(19) United States
(12) Patent Application Publication
(10) Pub. No.: US 2024/0318175 A1
(43) Pub. Date: Sep. 26, 2024

(54) Compositions and Methods for Silencing MYOC Expression

(71) Applicant: ALNYLAM PHARMACEUTICALS, INC., CAMBRIDGE, MA (US)

(72) Inventors: ADAM CASTORENO, FRAMINGHAM, MA (US); BHAUMIK A. PANDYA, BEDFORD, MA (US); ELENA CASTELLANOS-RIZALDOS, MELROSE, MA (US); MARK K. SCHLEGEL, LEXINGTON, MA (US); VASANT R. JADHAV, SHARON, MA (US)

(73) Assignee: ALNYLAM PHARMACEUTICALS, INC., CAMBRIDGE, MA (US)

(21) Appl. No.: 18/572,486

(22) PCT Filed: Jun. 28, 2022
(86) PCT No.: PCT/US2022/035266

§ 371 Date: Dec. 20, 2023

Related U.S. Application Data
(60) Provisional application No. 63/351,033, filed on Jun. 10, 2022.
(60) Provisional application No. 63/287,404, filed on Dec. 8, 2021.
(60) Provisional application No. 63/215,804, filed on Jun. 28, 2021.

(51) Int. Cl. C12N 15/113; A61K 9/00; A61K 45/06; A61P 27/06

(52) U.S. Cl. CPC C12N 15/113; A61K 9/0048; A61K 45/06; A61P 27/06; C12N 2310/11; C12N 2310/3125; C12N 2310/313; C12N 2310/3513; C12N 2310/3515; C12N 2310/533; C12N 2320/32

(57) ABSTRACT

The disclosure relates to double-stranded ribonucleic acid (dsRNA) compositions targeting MYOC, and methods of using such dsRNA compositions to alter (e.g., inhibit) expression of MYOC.

### CROSS-REFERENCE TO RELATED APPLICATIONS

[0001] This application claims the benefit of priority to U.S. Provisional Application No. 63/215,804, filed on Jun. 28, 2021, claims the benefit of priority to U.S. Provisional Application No. 63/287,404, filed on Dec. 8, 2021, and claims the benefit of priority to U.S. Provisional Application No. 63/351,033, filed on Jun. 10, 2022. The entire contents of the foregoing applications are hereby incorporated herein by reference.

### SEQUENCE LISTING

[0002] The instant application contains a Sequence Listing which has been submitted electronically in ASCII format and is hereby incorporated by reference in its entirety. Said ASCII copy, created on Jun. 22, 2022 is named A108868_1490WO_SL.txt and is 596,467 bytes in size.

### FIELD OF THE DISCLOSURE

[0003] The disclosure relates to the specific inhibition of the expression of the MYOC.

### BACKGROUND

[0004] Glaucoma (e.g., primary open angle glaucoma (POAG)) is a major cause of irreversible vision loss in today's aging population. MYOC protein misfolding occludes its secretion from trabecular meshwork cells, leading to elevated eye pressure that in turn compresses and damages the optic nerve reducing its ability to transmit visual information to the brain, which results in vision loss. New treatments for glaucoma are needed.

### SUMMARY

[0005] The present disclosure describes methods and iRNA compositions for modulating the expression of MYOC. In certain embodiments, expression of MYOC is reduced or inhibited using a MYOC-specific iRNA. Such inhibition can be useful in treating disorders related to 30 MYOC expression, such as ocular disorders (e.g., glaucoma, e.g., primary open angle glaucoma (POAG)).

[0006] Accordingly, described herein are compositions and methods that effect the RNA-induced silencing complex (RISC)-mediated cleavage of RNA transcripts of MYOC, such as in a cell or in a subject (e.g., in a mammal, such as a human subject). Also described are compositions and methods for treating a disorder related to expression of MYOC, such as glaucoma (e.g., primary open angle glaucoma (POAG))

[0007] The iRNAs (e.g., dsRNAs) included in the compositions featured herein include an RNA strand (the antisense strand) having a region, e.g., a region that is 30 nucleotides or less, generally 19-24 nucleotides in length, that is substantially complementary to at least part of an mRNA transcript of MYOC (e.g., a human MYOC) (also referred to herein as a “MYOC-specific iRNA”). In some embodiments, the MYOC mRNA transcript is a human MYOC mRNA transcript, e.g., SEQ ID NO. 1 herein.

[0008] In some embodiments, the iRNA (e.g., dsRNA) described herein comprises an antisense strand having a region that is substantially complementary to a region of a human MYOC mRNA. In some embodiments, the human MYOC mRNA has the sequence NM_000261.2 (SEQ ID NO: 1). The sequence of NM_000261.2 is also herein incorporated by reference in its entirety. The reverse complement of SEQ ID NO: 1 is provided as SEQ ID NO: 2 herein.

[0009] In some aspects, the present disclosure provides a double stranded ribonucleic acid (dsRNA) agent for inhibiting expression of myocilin (MYOC), wherein the dsRNA agent comprises a sense strand and an antisense strand forming a double stranded region, wherein the sense strand comprises a nucleotide sequence comprising at least 15 contiguous nucleotides, with 0, 1, 2, or 3 mismatches, of a portion of a coding strand of human MYOC and the antisense strand comprises a nucleotide sequence comprising at least 15 contiguous nucleotides, with 0, 1, 2, or 3 mismatches, of the corresponding portion of a non-coding strand of human MYOC such that the sense strand is complementary to the at least 15 contiguous nucleotides in the antisense strand.

[0010] In some aspects, the present disclosure provides a double stranded ribonucleic acid (dsRNA) agent for inhibiting expression of MYOC, wherein the dsRNA agent comprises a sense strand and an antisense strand forming a double stranded region, wherein the antisense strand comprises a nucleotide sequence comprising at least 15 contiguous nucleotides, with 0, 1, 2, or 3 mismatches, of a portion of nucleotide sequence of SEQ ID NO: 2 such that the sense strand is complementary to the at least 15 contiguous nucleotides in the antisense strand.

[0011] In some aspects, the present disclosure provides a double stranded ribonucleic acid (dsRNA) agent for inhibiting expression of MYOC, wherein the dsRNA agent comprises a sense strand and an antisense strand forming a double stranded region, wherein the antisense strand comprises a nucleotide sequence comprising at least 15 contiguous nucleotides, with 0, 1, 2, or 3 mismatches, from the antisense strand nucleotide sequence of duplex AD-1565804 and the sense strand comprises a nucleotide sequence comprising at least 15 contiguous nucleotides, with 0, 1, 2, or 3 mismatches, from the sense strand nucleotide sequence of duplex AD-1565804.

[0012] In some aspects, the present disclosure provides a double stranded ribonucleic acid (dsRNA) agent for inhibiting expression of MYOC, wherein the dsRNA agent comprises a sense strand and an antisense strand forming a double stranded region, wherein the antisense strand comprises a nucleotide sequence comprising at least 15 contiguous nucleotides, with 0, 1, 2, or 3 mismatches, from the antisense strand nucleotide sequence of duplex AD-1565837 and the sense strand comprises a nucleotide sequence comprising at least 15 contiguous nucleotides, with 0, 1, 2, or 3 mismatches, from the sense strand nucleotide sequence of duplex AD-1565837.

[0013] In some aspects, the present disclosure provides a human cell or tissue comprising a reduced level of MYOC mRNA or a level of MYOC protein as compared to an otherwise similar untreated cell or tissue, wherein optionally the cell or tissue is not genetically engineered (e.g., wherein the cell or tissue comprises one or more naturally arising mutations, e.g., MYOC mutations), wherein optionally the level is reduced by at least 10%, 15%, 20%, 25%, 30%, 35%, 40%, 45%, 50%, 55%, 60%, 65%, 70%, 75%, 80%, 85%, 90%, or 95%. In some embodiments, the human cell or tissue is a trabecular meshwork tissue, a ciliary body, a retinal pigment epithelium (RPE), a retinal tissue, an astrocyte, a pericyte, a Müller cell, a ganglion cell, an endothelial cell, a photoreceptor cell, a retinal blood vessel (e.g., including endothelial cells and vascular smooth muscle cells), or choroid tissue, e.g., a choroid vessel.

[0014] The present disclosure also provides, in some aspects, a cell containing the dsRNA agent described herein.

[0015] In another aspect, provided herein is a human ocular cell, e.g., (a cell of the trabecular meshwork, a cell of the ciliary body, an RPE cell, a retinal cell, an astrocyte, a pericyte, a Müller cell, a ganglion cell, an endothelial cell, or a photoreceptor cell) comprising a reduced level of MYOC mRNA or a level of MYOC protein as compared to an otherwise similar untreated cell. In some embodiments, the level is reduced by at least 10%, 15%, 20%, 25%, 30%, 35%, 40%, 45%, 50%, 55%, 60%, 65%, 70%, 75%, 80%, 85%, 90%, or 95%.

[0016] In some aspects, the present disclosure also provides a pharmaceutical composition for inhibiting expression of a gene encoding MYOC, comprising a dsRNA agent described herein.

[0017] The present disclosure also provides, in some aspects, a method of inhibiting expression of MYOC in a cell, the method comprising:
[0018] (a) contacting the cell with the dsRNA agent described herein, or a pharmaceutical composition described herein; and
[0019] (b) maintaining the cell produced in step (a) for a time sufficient to obtain degradation of the mRNA transcript of MYOC, thereby inhibiting expression of the MYOC in the cell.

[0020] The present disclosure also provides, in some aspects, a method of inhibiting expression of MYOC in a cell, the method comprising:
[0021] (a) contacting the cell with the dsRNA agent described herein, or a pharmaceutical composition described herein; and
[0022] (b) maintaining the cell produced in step (a) for a time sufficient to reduce levels of MYOC mRNA, MYOC protein, or both of MYOC mRNA and protein, thereby inhibiting expression of the MYOC in the cell.

[0023] The present disclosure also provides, in some aspects, a method of inhibiting expression of MYOC in an ocular cell or tissue, the method comprising:
[0024] (a) contacting the cell or tissue with a dsRNA agent that binds MYOC; and
[0025] (b) maintaining the cell or tissue produced in step (a) for a time sufficient to reduce levels of MYOC mRNA, MYOC protein, or both of MYOC mRNA and protein, thereby inhibiting expression of MYOC in the cell or tissue.

[0026] The present disclosure also provides, in some aspects, a method of treating a subject diagnosed with MYOC-associated disorder comprising administering to the subject a therapeutically effective amount of the dsRNA agent described herein or a pharmaceutical composition described herein, thereby treating the disorder.

[0027] In any of the aspects herein, e.g., the compositions and methods above, any of the embodiments herein (e.g., below) may apply.

[0028] In some embodiments, the coding strand of human MYOC has the sequence of SEQ ID NO: 1. In some embodiments, the non-coding strand of human MYOC has the sequence of SEQ ID NO: 2.

[0029] In some embodiments, the sense strand comprises a nucleotide sequence comprising at least 15 contiguous nucleotides, with 0, or 1, 2, or 3 mismatches, of the corresponding portion of the nucleotide sequence of SEQ ID NO: 1.

[0030] In some embodiments, the dsRNA agent comprises a sense strand and an antisense strand, wherein the antisense strand comprises a nucleotide sequence comprising at least 17 contiguous nucleotides, with 0, 1, 2, or 3 mismatches, of a portion of nucleotide sequence of SEQ ID NO: 2 such that the sense strand is complementary to the at least 17 contiguous nucleotides in the antisense strand. In some embodiments, the sense strand comprises a nucleotide sequence comprising at least 17 contiguous nucleotides, with 0, or 1, 2, or 3 mismatches, of the corresponding portion of the nucleotide sequence of SEQ ID NO: 1.

[0031] In some embodiments, the dsRNA agent comprises a sense strand and an antisense strand, wherein the antisense strand comprises a nucleotide sequence comprising at least 19 contiguous nucleotides, with 0, 1, 2, or 3 mismatches, of a portion of nucleotide sequence of SEQ ID NO: 2 such that the sense strand is complementary to the at least 19 contiguous nucleotides in the antisense strand. In some embodiments, the sense strand comprises a nucleotide sequence comprising at least 19 contiguous nucleotides, with 0, 1, 2, or 3 mismatches, of the corresponding portion of the nucleotide sequence of SEQ ID NO: 1.

[0032] In some embodiments, the dsRNA agent comprises a sense strand and an antisense strand, wherein the antisense strand comprises a nucleotide sequence comprising at least 21 contiguous nucleotides, with 0, 1, 2, or 3 mismatches, of a portion of nucleotide sequence of SEQ ID NO: 2 such that the sense strand is complementary to the at least 21 contiguous nucleotides in the antisense strand. In some embodiments, the sense strand comprises a nucleotide sequence comprising at least 21 contiguous nucleotides, with 0, or 1, 2, or 3 mismatches, of the corresponding portion of the nucleotide sequence of SEQ ID NO: 1.

[0033] In some embodiments, the portion of the sense strand is a portion within a sense strand in any one of Tables 2A and 2B.

[0034] In some embodiments, the portion of the antisense strand is a portion within an antisense strand in any one of Tables 2A and 2B.

[0035] In some embodiments, the antisense strand comprises a nucleotide sequence comprising at least 15 contiguous nucleotides, with 0, 1, 2, or 3 mismatches, from one of the antisense sequences listed in any one of Tables 2A and 2B. In some embodiments, the sense strand comprises a nucleotide sequence comprising at least 15 contiguous nucleotides, with 0, 1, 2, or 3 mismatches, from a sense sequence listed in any one of Tables 2A and 2B that corresponds to the antisense sequence.

[0036] In some embodiments, the antisense strand comprises a nucleotide sequence comprising at least 17 contiguous nucleotides, with 0, 1, 2, or 3 mismatches, from one of the antisense sequences listed in any one of Tables 2A and 2B. In some embodiments, the sense strand comprises a nucleotide sequence comprising at least 17 contiguous nucleotides, with 0, 1, 2, or 3 mismatches, from a sense sequence listed in any one of Tables 2A and 2B that corresponds to the antisense sequence.

[0037] In some embodiments, the antisense strand comprises a nucleotide sequence comprising at least 19 contiguous nucleotides, with 0, 1, 2, or 3 mismatches, from one of the antisense sequences listed in any one of Tables 2A and 2B. In some embodiments, the sense strand comprises a nucleotide sequence comprising at least 19 contiguous nucleotides, with 0, 1, 2, or 3 mismatches, from a sense sequence listed in any one of Tables 2A and 2B that corresponds to the antisense sequence.

[0038] In some embodiments, the antisense strand comprises a nucleotide sequence comprising at least 21 contiguous nucleotides, with 0, 1, 2, or 3 mismatches, from one of the antisense sequences listed in any one of Tables 2A and 2B. In some embodiments, the sense strand comprises a nucleotide sequence comprising at least 21 contiguous nucleotides, with 0, 1, 2, or 3 mismatches, from a sense sequence listed in any one of Tables 2A and 2B that corresponds to the antisense sequence.

[0039] In some embodiments, the sense strand of the dsRNA agent is at least 23 nucleotides in length, e.g., 23-30 nucleotides in length.

[0040] In some embodiments, at least one of the sense strand and the antisense strand is conjugated to one or more lipophilic moieties. In some embodiments, the lipophilic moiety is conjugated to one or more positions in the double stranded region of the dsRNA agent. In some embodiments, the lipophilic moiety is conjugated via a linker or carrier. In some embodiments, lipophilicity of the lipophilic moiety, measured by logK_{ow}, exceeds 0.

[0041] In some embodiments, the hydrophobicity of the double-stranded RNAi agent, measured by the unbound fraction in a plasma protein binding assay of the double-stranded RNAi agent, exceeds 0.2. In some embodiments, the plasma protein binding assay is an electrophoretic mobility shift assay using human serum albumin protein.

[0042] In some embodiments, the dsRNA agent comprises at least one modified nucleotide. In some embodiments, no more than five of the sense strand nucleotides and not more than five of the nucleotides of the antisense strand are unmodified nucleotides. In some embodiments, all of the nucleotides of the sense strand and all of the nucleotides of the antisense strand comprise a modification.

[0043] In some embodiments, at least one of the modified nucleotides is selected from the group consisting of a deoxy-nucleotide, a 3′-terminal deoxy-thymine (dT) nucleotide, a 2′-O-methyl modified nucleotide, a 2′-fluoro modified nucleotide, a 2′-deoxy-modified nucleotide, a locked nucleotide, an unlocked nucleotide, a conformationally restricted nucleotide, a constrained ethyl nucleotide, an abasic nucleotide, a 2′-amino-modified nucleotide, a 2′-O-allyl-modified nucleotide, 2′-C-alkyl-modified nucleotide, a 2′-methoxyethyl modified nucleotide, a 2′-O-alkyl-modified nucleotide, a morpholino nucleotide, a phosphoramidate, a non-natural base comprising nucleotide, a tetrahydropyran modified nucleotide, a 1,5-anhydrohexitol modified nucleotide, a cyclohexenyl modified nucleotide, a nucleotide comprising a phosphorothioate group, a nucleotide comprising a methylphosphonate group, a nucleotide comprising a 5′-phosphate, a nucleotide comprising a 5′-phosphate mimic, a glycol modified nucleotide, and a 2′-O—(N-methylacetamide) modified nucleotide; and combinations thereof. In some embodiments, no more than five of the sense strand nucleotides and not more than five of the nucleotides of the antisense strand include modifications other than 2′-O-methyl modified nucleotide, a 2′-fluoro modified nucleotide, a 2′-deoxy-modified nucleotide, unlocked nucleic acids (UNA) or glycerol nucleic acid (GNA).

[0044] In some embodiments, the dsRNA comprises a non-nucleotide spacer (wherein optionally the non-nucleotide spacer comprises a C3-C6 alkyl) between two of the contiguous nucleotides of the sense strand or between two of the contiguous nucleotides of the antisense strand.

[0045] In some embodiments, each strand is no more than 30 nucleotides in length. In some embodiments, at least one strand comprises a 3′ overhang of at least 1 nucleotide. In some embodiments, at least one strand comprises a 3′ overhang of at least 2 nucleotides. In some embodiments, at least one strand comprises a 3′ overhang of 2 nucleotides.

[0046] In some embodiments, the double stranded region is 15-30 nucleotide pairs in length. In some embodiments, the double stranded region is 17-23 nucleotide pairs in length. In some embodiments, the double stranded region is 17-25 nucleotide pairs in length. In some embodiments, the double stranded region is 23-27 nucleotide pairs in length. In some embodiments, the double stranded region is 19-21 nucleotide pairs in length. In some embodiments, the double stranded region is 21-23 nucleotide pairs in length. In some embodiments, each strand has 19-30 nucleotides. In some embodiments, each strand has 19-23 nucleotides. In some embodiments, each strand has 21-23 nucleotides.

[0047] In some embodiments, the agent comprises at least one phosphorothioate or methylphosphonate internucleotide linkage. In some embodiments, the phosphorothioate or methylphosphonate internucleotide linkage is at the 3′-terminus of one strand. In some embodiments, the strand is the antisense strand. In some embodiments, the strand is the sense strand.

[0048] In some embodiments, the phosphorothioate or methylphosphonate internucleotide linkage is at the 5′-terminus of one strand. In some embodiments, the strand is the antisense strand. In some embodiments, the strand is the sense strand.

[0049] In some embodiments, each of the 5′- and 3′-terminus of one strand comprises a phosphorothioate or methylphosphonate internucleotide linkage. In some embodiments, the strand is the antisense strand.

[0050] In some embodiments, the base pair at the 1 position of the 5′-end of the antisense strand of the duplex is an AU base pair.

[0051] In some embodiments, the sense strand has a total of 21 nucleotides and the antisense strand has a total of 23 nucleotides.

[0052] In some embodiments, one or more lipophilic moieties are conjugated to one or more internal positions on at least one strand. In some embodiments, the one or more lipophilic moieties are conjugated to one or more internal positions on at least one strand via a linker or carrier.

[0053] In some embodiments, the internal positions include all positions except the terminal two positions from each end of the at least one strand. In some embodiments, the internal positions include all positions except the terminal three positions from each end of the at least one strand. In some embodiments, the internal positions exclude a cleavage site region of the sense strand. In some embodiments, the internal positions include all positions except positions 9-12, counting from the 5′-end of the sense strand. In some embodiments, the internal positions include all positions except positions 11-13, counting from the 3′-end of the sense strand. In some embodiments, the internal positions exclude a cleavage site region of the antisense strand. In some embodiments, the internal positions include all positions except positions 12-14, counting from the 5′-end of the antisense strand. In some embodiments, the internal positions include all positions except positions 11-13 on the sense strand, counting from the 3′-end, and positions 12-14 on the antisense strand, counting from the 5′-end.

[0054] In some embodiments, the one or more lipophilic moieties are conjugated to one or more of the internal positions selected from the group consisting of positions 4-8 and 13-18 on the sense strand, and positions 6-10 and 15-18 on the antisense strand, counting from the 5′end of each strand. In some embodiments, the one or more lipophilic moieties are conjugated to one or more of the internal positions selected from the group consisting of positions 5, 6, 7, 15, and 17 on the sense strand, and positions 15 and 17 on the antisense strand, counting from the 5′-end of each strand.

[0055] In some embodiments, the positions in the double stranded region exclude a cleavage site region of the sense strand.

[0056] In some embodiments, the sense strand is 21 nucleotides in length, the antisense strand is 23 nucleotides in length, and the lipophilic moiety is conjugated to position 21, position 20, position 15, position 1, position 7, position 6, or position 2 of the sense strand or position 16 of the antisense strand. In some embodiments, the lipophilic moiety is conjugated to position 21, position 20, position 15, position 1, or position 7 of the sense strand. In some embodiments, the lipophilic moiety is conjugated to position 21, position 20, or position 15 of the sense strand. In some embodiments, the lipophilic moiety is conjugated to position 20 or position 15 of the sense strand. In some embodiments, the lipophilic moiety is conjugated to position 16 of the antisense strand. In some embodiments, the lipophilic moiety is conjugated to position 6, counting from the 5′-end of the sense strand.

[0057] In some embodiments, the lipophilic moiety is an aliphatic, alicyclic, or polyalicyclic compound. In some embodiments, the lipophilic moiety is selected from the group consisting of lipid, cholesterol, retinoic acid, cholic acid, adamantane acetic acid, 1-pyrene butyric acid, dihydrotestosterone, 1,3-bis-O(hexadecyl)glycerol, geranyloxyhexyanol, hexadecylglycerol, borneol, menthol, 1,3-propanediol, heptadecyl group, palmitic acid, myristic acid, O3-((oleoyl)lithocholic acid, O3-(oleoyl)cholenic acid, dimethoxytrityl, or phenoxazine. In some embodiments, the lipophilic moiety contains a saturated or unsaturated C4-C30 hydrocarbon chain, and an optional functional group selected from the group consisting of hydroxyl, amine, carboxylic acid, sulfonate, phosphate, thiol, azide, and alkyne. In some embodiments, the lipophilic moiety contains a saturated or unsaturated C6-C18 hydrocarbon chain. In some embodiments, the lipophilic moiety contains a saturated or unsaturated C16 hydrocarbon chain.

[0058] In some embodiments, the lipophilic moiety is conjugated via a carrier that replaces one or more nucleotide(s) in the internal position(s) or the double stranded region. In some embodiments, the carrier is a cyclic group selected from the group consisting of pyrrolidinyl, pyrazolinyl, pyrazolidinyl, imidazolinyl, imidazolidinyl, piperidinyl, piperazinyl, [1,3]dioxolanyl, oxazolidinyl, isoxazolidinyl, morpholinyl, thiazolidinyl, isothiazolidinyl, quinoxalinyl, pyridazinonyl, tetrahydrofuranyl, and decalinyl; or is an acyclic moiety based on a serinol backbone or a diethanolamine backbone.

[0059] In some embodiments, the lipophilic moiety is conjugated to the double-stranded iRNA agent via a linker containing an ether, thioether, urea, carbonate, amine, amide, maleimide-thioether, disulfide, phosphodiester, sulfonamide linkage, a product of a click reaction, or carbamate.

[0060] In some embodiments, the lipophilic moiety is conjugated to a nucleobase, sugar moiety, or internucleosidic linkage.

[0061] In some embodiments, the lipophilic moiety or targeting ligand is conjugated via a bio-cleavable linker selected from the group consisting of DNA, RNA, disulfide, amide, functionalized monosaccharides or oligosaccharides of galactosamine, glucosamine, glucose, galactose, mannose, and combinations thereof.

[0062] In some embodiments, the 3′ end of the sense strand is protected via an end cap which is a cyclic group having an amine, said cyclic group being selected from the group consisting of pyrrolidinyl, pyrazolinyl, pyrazolidinyl, imidazolinyl, imidazolidinyl, piperidinyl, piperazinyl, [1,3]dioxolanyl, oxazolidinyl, isoxazolidinyl, morpholinyl, thiazolidinyl, isothiazolidinyl, quinoxalinyl, pyridazinonyl, tetrahydrofuranyl, and decalinyl.

[0063] In some embodiments, the dsRNA agent further comprises a targeting ligand, e.g., a ligand that targets an ocular tissue or a liver tissue. In some embodiments, the ocular tissue is a trabecular meshwork tissue, a ciliary body, a retinal tissue, a retinal pigment epithelium (RPE) or choroid tissue, e.g., a choroid vessel.

[0064] In some embodiments, the ligand is conjugated to the sense strand. In some embodiments, the ligand is conjugated to the 3′ end or the 5′ end of the sense strand. In some embodiments, the ligand is conjugated to the 3′ end of the sense strand.

[0065] In some embodiments, the ligand comprises N-acetylgalactosamine (GalNAc). In some embodiments, the targeting ligand comprises one or more GalNAc conjugates or one or more GalNAc derivatives. In some embodiments, the ligand is one or more GalNAc conjugates or one or more GalNAc derivatives are attached through a monovalent linker, or a bivalent, trivalent, or tetravalent branched linker. In some embodiments, the ligand is

[chemical structure]

[0066] In some embodiments, the dsRNA agent is conjugated to the ligand as shown in the following schematic

[chemical structure]

[0067] wherein X is O or S. In some embodiments, the X is O.

[0068] In some embodiments, the dsRNA agent further comprises a terminal, chiral modification occurring at the first internucleotide linkage at the 3′ end of the antisense strand, having the linkage phosphorus atom in Sp configuration, a terminal, chiral modification occurring at the first internucleotide linkage at the 5′ end of the antisense strand, having the linkage phosphorus atom in Rp configuration, and a terminal, chiral modification occurring at the first internucleotide linkage at the 5′ end of the sense strand, having the linkage phosphorus atom in either Rp configuration or Sp configuration.

[0069] In some embodiments, the dsRNA agent further comprises a terminal, chiral modification occurring at the first and second internucleotide linkages at the 3′ end of the antisense strand, having the linkage phosphorus atom in Sp configuration, a terminal, chiral modification occurring at the first internucleotide linkage at the 5′ end of the antisense strand, having the linkage phosphorus atom in Rp configuration, and a terminal, chiral modification occurring at the first internucleotide linkage at the 5′ end of the sense strand, having the linkage phosphorus atom in either Rp or Sp configuration.

[0070] In some embodiments, the dsRNA agent further comprises a terminal, chiral modification occurring at the first, second and third internucleotide linkages at the 3′ end of the antisense strand, having the linkage phosphorus atom in Sp configuration, a terminal, chiral modification occurring at the first internucleotide linkage at the 5′ end of the antisense strand, having the linkage phosphorus atom in Rp configuration, and a terminal, chiral modification occurring at the first internucleotide linkage at the 5′ end of the sense strand, having the linkage phosphorus atom in either Rp or Sp configuration.

[0071] In some embodiments, the dsRNA agent further comprises a terminal, chiral modification occurring at the first, and second internucleotide linkages at the 3′ end of the antisense strand, having the linkage phosphorus atom in Sp configuration, a terminal, chiral modification occurring at the third internucleotide linkages at the 3′ end of the antisense strand, having the linkage phosphorus atom in Rp configuration, a terminal, chiral modification occurring at the first internucleotide linkage at the 5′ end of the antisense strand, having the linkage phosphorus atom in Rp configuration, and a terminal, chiral modification occurring at the first internucleotide linkage at the 5′ end of the sense strand, having the linkage phosphorus atom in either Rp or Sp configuration.

[0072] In some embodiments, the dsRNA agent further comprises a terminal, chiral modification occurring at the first, and second internucleotide linkages at the 3′ end of the antisense strand, having the linkage phosphorus atom in Sp configuration, a terminal, chiral modification occurring at the first, and second internucleotide linkages at the 5′ end of the antisense strand, having the linkage phosphorus atom in Rp configuration, and a terminal, chiral modification occurring at the first internucleotide linkage at the 5′ end of the sense strand, having the linkage phosphorus atom in either Rp or Sp configuration.

[0073] In some embodiments, the dsRNA agent further comprises a phosphate or phosphate mimic at the 5′-end of the antisense strand. In some embodiments, the phosphate mimic is a 5′-vinyl phosphonate (VP).

[0074] In various embodiments of the aforementioned dsRNA agents, the dsRNA agent targets a hotspot region of an mRNA encoding MYOC.

[0075] In another aspect, the present invention provides a dsRNA agent that targets a hotspot region of a myocilin (MYOC) mRNA.

[0076] In some embodiments, a cell described herein, e.g., a human cell, was produced by a process comprising contacting a human cell with the dsRNA agent described herein.

[0077] In some embodiments, a pharmaceutical composition described herein comprises the dsRNA agent and a lipid formulation.

[0078] In some embodiments (e.g., embodiments of the methods described herein), the cell is within a subject. In some embodiments, the subject is a human. In some embodiments, the level of MYOC mRNA is inhibited by at least 50%. In some embodiments, the level of MYOC protein is inhibited by at least 50%. In some embodiments, the expression of MYOC is inhibited by at least 50%. In some embodiments, inhibiting expression of MYOC decreases the MYOC protein level in a biological sample (e.g., an aqueous ocular fluid sample) from the subject by at least 30%, 40%, 50%, 60%, 70%, 80%, 90%, or 95%. In some embodiments, inhibiting expression of MYOC gene decreases the MYOC mRNA level in a biological sample (e.g., an aqueous ocular fluid sample) from the subject by at least 30%, 40%, 50%, 60%, 70%, 80%, 90%, or 95%.

[0079] In some embodiments, the subject has been diagnosed with a MYOC-associated disorder.

[0080] In some embodiments, the subject meets at least one diagnostic criterion for a MYOC-associated disorder. In some embodiments, the MYOC associated disorder is glaucoma. In some embodiments, the MYOC associated disorder is primary open angle glaucoma (POAG).

[0081] In some embodiments, the ocular cell or tissue is a trabecular meshwork tissue, a ciliary body, RPE, a retinal cell, an astrocyte, a pericyte, a Müller cell, a ganglion cell, an endothelial cell, a photoreceptor cell, a retinal blood vessel (e.g., including endothelial cells and vascular smooth muscle cells), or choroid tissue, e.g., a choroid vessel.

[0082] In some embodiments, the MYOC-associated disorder is a glaucoma. In some embodiments, the glaucoma is caused by or associated with an elevated eye pressure. In some embodiments, the glaucoma primary open angle glaucoma (POAG)).

[0083] In some embodiments, treating comprises amelioration of at least one sign or symptom of the disorder. In some embodiments, the at least one sign or symptom includes a measure of one or more of optic nerve damage, vision loss, tunnel vision, blurred vision, eye pain or presence, level, or activity of MYOC (e.g., MYOC gene, MYOC mRNA, or MYOC protein).

[0084] In some embodiments, a level of the MYOC that is higher than a reference level is indicative that the subject has glaucoma. In some embodiments, treating comprises prevention of progression of the disorder. In some embodiments, the treating comprises one or more of (a) inhibiting or reducing the expression or activity of MYOC; (b) reducing the level of misfolded MYOC protein; (c) reducing trabecular meshwork cell death; (d) decreasing intraocular pressure; or (e) increasing visual acuity.

[0085] In some embodiments, the treating results in at least a 30% mean reduction from baseline of MYOC mRNA in the trabecular meshwork tissue, ciliary body, retina, RPE, a retinal blood vessel (e.g., including endothelial cells and vascular smooth muscle cells), or choroid tissue, e.g., a choroid vessel. In some embodiments, the treating results in at least a 60% mean reduction from baseline of MYOC mRNA in the trabecular meshwork tissue, ciliary body, retina, RPE, a retinal blood vessel (e.g., including endothelial cells and vascular smooth muscle cells), or choroid tissue, e.g., a choroid vessel. In some embodiments, the treating results in at least a 90% mean reduction from baseline of MYOC mRNA in the trabecular meshwork tissue, ciliary body, retina, RPE, a retinal blood vessel (e.g., including endothelial cells and vascular smooth muscle cells), or choroid tissue, e.g., a choroid vessel.

[0086] In some embodiments, after treatment the subject experiences at least an 8-week duration of knockdown following a single dose of dsRNA as assessed by MYOC protein in the retina. In some embodiments, treating results in at least a 12-week duration of knockdown following a single dose of dsRNA as assessed by MYOC protein in the retina. In some embodiments, treating results in at least a 16-week duration of knockdown following a single dose of dsRNA as assessed by MYOC protein in the retina.

[0087] In some embodiments, the subject is human.

[0088] In some embodiments, the dsRNA agent is administered at a dose of about 0.01 mg/kg to about 50 mg/kg.

[0089] In some embodiments, the dsRNA agent is administered to the subject intraocularly. In some embodiments, the intraocular administration comprises intravitreal administration, e.g., intravitreal injection; transscleral administration, e.g., transscleral injection; subconjunctival administration, e.g., subconjunctival injection; retrobulbar administration, e.g., retrobulbar injection; intracameral administration, e.g., intracameral injection, or subretinal administration, e.g., subretinal injection.

[0090] In some embodiments, the dsRNA agent is administered to the subject intravenously. In some embodiments, the dsRNA agent is administered to the subject topically.

[0091] In some embodiments, a method described herein further comprises measuring a level of MYOC (e.g., MYOC gene, MYOC mRNA, or MYOC protein) in the subject. In some embodiments, measuring the level of MYOC in the subject comprises measuring the level of MYOC protein in a biological sample from the subject (e.g., an aqueous ocular fluid sample). In some embodiments, a method described herein further comprises performing a blood test, an imaging test, or an aqueous ocular fluid biopsy (e.g., an aqueous humor tap).

[0092] In some embodiments, a method described herein further measuring a level of MYOC (e.g., MYOC gene, MYOC mRNA, or MYOC protein) in the subject is performed prior to treatment with the dsRNA agent or the pharmaceutical composition. In some embodiments, upon determination that a subject has a level of MYOC that is greater than a reference level, the dsRNA agent or the pharmaceutical composition is administered to the subject. In some embodiments, measuring level of MYOC in the subject is performed after treatment with the dsRNA agent or the pharmaceutical composition.

[0093] In some embodiments, a method described herein further comprises treating the subject with a therapy suitable for treatment or prevention of a MYOC-associated disorder, e.g., wherein the therapy comprises laser trabeculoplasty surgery, trabeculectomy surgery, a minimally invasive glaucoma surgery, or placement of a drainage tube in the eye. In some embodiments, a method described herein further comprises administering to the subject an additional agent suitable for treatment or prevention of a MYOC-associated disorder. In some embodiments, the additional agent comprises a carbonic anhydrase inhibitor, a prostaglandin, a beta blocker, an alpha-adrenergic agonist, a carbonic anhydrase inhibitor, a Rho kinase inhibitor, or a cholinergic agent, or any combination thereof. In some embodiments, the additional agent comprises an oral medication or an eye drop.

[0094] All publications, patent applications, patents, and other references mentioned herein are incorporated by reference in their entirety.

### BRIEF DESCRIPTION OF THE DRAWINGS

[0095] The accompanying figures, which are incorporated in and constitute a part of this specification, illustrate several features of the present disclosure.

[0096] The patent or application file contains at least one drawing executed in color. Copies of this patent or patent application publication with color drawing(s) will be provided by the Office upon request and payment of the necessary fee.

[0097] FIG. 1A shows the experimental setup for testing the effect of human MYOC siRNA AD-822899 on intraocular pressure (IOP) in SAM mice comprising a humanized MY-OC locus comprising a Y437H mutation (SAM-MYOC mice, homozygous for each allele) treated with AAV2.Y3F-SAM-g4.

[0098] FIG. 1B shows intraocular pressure (IOP) in SAM mice comprising a humanized MYOC locus comprising a Y437H mutation (SAM-MYOC mice, homozygous for each allele) treated with AAV2.Y3F-SAM-g4 or nothing (naïve), and in which the AAV2.Y3F-SAM-g4-treated mice were subsequently treated with either human MYOC siRNA or a control luciferase siRNA.

[0099] FIG. 2A shows the experimental setup for testing the effect of human MYOC siRNAs AD-822899, AD-1565804, AD-1565837, AD-1193175, and AD-1565503 on intraocular pressure (IOP) in SAM mice comprising a humanized MYOC locus comprising a Y437H mutation (SAM-MYOC mice, homozygous for each allele) treated with LV-SAM-g4.

[0100] FIG. 2B shows intraocular pressure (IOP) in SAM mice comprising a humanized MYOC locus comprising a Y437H mutation (SAM-MYOC mice, homozygous for each allele) treated with LV-SAM-g4 or PBS, and in which the LV-SAM-g4-treated mice were subsequently treated with humanMYOC siRNA AD-822899, AD-1565804, AD-1565837, AD-1193175, or AD-1565503.

[0101] FIG. 2C shows qPCR results showing the percentage of human MYOC mRNA expression relative to Gapdh in SAM mice comprising a humanized MYOC locus comprising a Y437H mutation (SAM-MYOC mice, homozygous for each allele) treated with LV-SAM-g4 or PBS, and in which the LV-SAM-g4-treated mice were subsequently treated with human MYOC siRNA AD-822899, AD-1565804, AD-1565837, AD-1193175, or AD-1565503.

[0102] FIG. 2D shows RNASCOPE® analysis of human MYOC mRNA expression in eyes from SAM mice comprising a humanized MYOC locus comprising a Y437H mutation (SAM-MYOC mice, homozygous for each allele) treated with LV-SAM-g4 or PBS, and in which the LV-SAM-g4-treated mice were subsequently treated with human MYOC siRNA AD-1565804 or AD-1565837.

[0103] FIG. 3A shows the experimental setup for testing the effect of human MYOC siRNAs AD-1565804 or AD-1565837 on intraocular pressure (IOP) in SAM mice comprising a humanized MYOC locus comprising a Y437H mutation (SAM-MYOC mice, homozygous for each allele) treated with LV-SAM-g4.

[0104] FIG. 3B shows intraocular pressure (IOP) in SAM mice comprising a humanized MYOC locus comprising a Y437H mutation (SAM-MYOC mice, homozygous for each allele) treated with LV-SAM-g4 or PBS, and in which the LV-SAM-g4-treated mice were subsequently treated with human MYOC siRNA AD-1565804 or AD-1565837.

[0105] FIG. 3C shows qPCR results showing the percentage of human MYOC mRNA expression relative to Gapdh in SAM mice comprising a humanized MYOC locus comprising a Y437H mutation (SAM-MYOC mice, homozygous for each allele) treated with LV-SAM-g4 or PBS, and in which the LV-SAM-g4-treated mice were subsequently treated with human MYOC siRNA AD-1565804 or AD-1565837.

[0106] FIG. 4 shows the percent MYOC protein remaining relative to PBS in the TM at day 85 after dosing with either AD-1565837 duplex or AD-1565804 duplex in the non-human primate (NHP) model. Results are shown for two different MYOC antibodies, R&D and Abnova.

[0107] FIG. 5 depicts the percent MYOC protein remaining in the aqueous humor relative to pre-dose at days −35, 22, 50, and 85 after dosing with either AD-1565837 duplex or AD-1565804 duplex in the non-human primate (NHP) model.

[0108] FIG. 6A shows the percent MYOC protein remaining relative to PBS in the vitreous humor and ciliary body at day 85 after dosing with either AD-1565837 duplex or AD-1565804 duplex in the non-human primate (NHP) model.

[0109] FIG. 6B shows the percent MYOC protein remaining relative to PBS in the iris and sclera at day 85 after dosing with either AD-1565837 duplex or AD-1565804 duplex in the non-human primate (NHP) model.

[0110] FIG. 7 depicts the percent MYOC mRNA remaining in the aqueous humor relative to PBS at day 85 after dosing with either AD-1565837 duplex or AD-1565804 duplex in the non-human primate (NHP) model.

[0111] The details of various embodiments of the disclosure are set forth in the description below. Other features, objects, and advantages of the disclosure will be apparent from the description and the drawings, and from the claims.

### DETAILED DESCRIPTION

[0112] iRNA directs the sequence-specific degradation of mRNA through a process known as RNA interference (RNAi). Described herein are iRNAs and methods of using them for modulating (e.g., inhibiting) the expression of MYOC. Also provided are compositions and methods for treatment of disorders related to MYOC expression, such as glaucoma (e.g., primary open angle glaucoma (POAG)).

[0113] Human MYOC is a secreted glycoprotein of approximately 57 kDa that regulates the activation of several signaling pathways in adjacent cells to control different processes including cell adhesion, cell-matrix adhesion, cytoskeleton organization, and cell migration. MYOC is typically expressed and secreted by a variety of tissues including the retina and the structures involved in aqueous humor regulation such as the trabecular meshwork tissue and the ciliary body. Aberrant MYOC is associated with glaucoma, for instance primary open angle glaucoma (POAG). Without wishing to be bound by theory, aberrant MYOC may exacerbate the pathogenesis of glaucoma, e.g., by impeding the drainage of aqueous humor consequently leading to an increased intraocular pressure.

[0114] The following description discloses how to make and use compositions containing iRNAs to modulate (e.g., inhibit) the expression of MYOC, as well as compositions and methods for treating disorders related to expression of MYOC.

[0115] In some aspects, pharmaceutical compositions containing MYOC iRNA and a pharmaceutically acceptable carrier, methods of using the compositions to inhibit expression of MYOC, and methods of using the pharmaceutical compositions to treat disorders related to expression of MYOC (e.g., glaucoma, e.g., primary open angle glaucoma (POAG)) are featured herein.

### I. DEFINITIONS

[0116] For convenience, the meaning of certain terms and phrases used in the specification, examples, and appended claims, are provided below. If there is an apparent discrepancy between the usage of a term in other parts of this specification and its definition provided in this section, the definition in this section shall prevail.

[0117] The term “about” when referring to a number or a numerical range means that the number or numerical range referred to is an approximation within experimental variability (or within statistical experimental error), and thus the number or numerical range may vary from, for example, between 1% and 15% of the stated number or numerical range.

[0118] The terms “or more” and “at least” prior to a number or series of numbers is understood to include the number adjacent to the term “at least”, and all subsequent numbers or integers that could logically be included, as clear from context. For example, the number of nucleotides in a nucleic acid molecule must be an integer. For example, “at least 17 nucleotides of a 20 nucleotide nucleic acid molecule” means that 17, 18, 19, or 20 nucleotides have the indicated property. When “at least” is present before a series of numbers or a range, it is understood that “at least” can modify each of the numbers in the series or range.

[0119] As used herein, “or less” and “no more than” are understood as including the value adjacent to the phrase and logical lower values or integers, as logical from context, to zero. For example, a duplex with mismatches to a target site of “no more than 2 nucleotides” has a 2, 1, or 0 mismatches. When “no more than” is present before a series of numbers or a range, it is understood that “no more than” can modify each of the numbers in the series or range.

[0120] As used herein, “less than” is understood as not including the value adjacent to the phrase and including logical lower values or integers, as logical from context, to zero. For example, a duplex with mismatches to a target site of “less than 3 nucleotides” has 2, 1, or 0 mismatches. When “less than” is present before a series of numbers or a range, it is understood that “less than” can modify each of the numbers in the series or range.

[0121] As used herein, “more than” is understood as not including the value adjacent to the phrase and including logical higher values or integers, as logical from context, to infinity. For example, a duplex with mismatches to a target site of “more than 3 nucleotides” has 4, 5, 6, or more mismatches. When “more than” is present before a series of numbers or a range, it is understood that “more than” can modify each of the numbers in the series or range.

[0122] As used herein, “up to” as in “up to 10” is understood as up to and including 10, i.e., 0, 1, 2, 3, 4, 5, 6, 7, 8, 9, or 10.

[0123] Ranges provided herein are understood to include all individual integer values and all subranges within the ranges.

[0124] The terms “activate,” “enhance,” “up-regulate the expression of,” “increase the expression of,” and the like, in so far as they refer to a MYOC gene, herein refer to the at least partial activation of the expression of a MYOC gene, as manifested by an increase in the amount of MYOC mRNA, which may be isolated from or detected in a first cell or group of cells in which a MYOC gene is transcribed and which has or have been treated such that the expression of a MYOC gene is increased, as compared to a second cell or group of cells substantially identical to the first cell or group of cells but which has or have not been so treated (control cells).

[0125] In some embodiments, expression of a MYOC gene is activated by at least about 10%, 15%, 20%, 25%, 30%, 35%, 40%, 45%, or 50% by administration of an iRNA as described herein. In some embodiments, a MYOC gene is activated by at least about 60%, 70%, or 80% by administration of an iRNA featured in the disclosure. In some embodiments, expression of a MYOC gene is activated by at least about 85%, 90%, or 95% or more by administration of an iRNA as described herein. In some embodiments, the MYOC gene expression is increased by at least 1-fold, at least 2-fold, at least 5-fold, at least 10-fold, at least 50-fold, at least 100-fold, at least 500-fold, at least 1000-fold or more in cells treated with an iRNA as described herein compared to the expression in an untreated cell. Activation of expression by small dsRNAs is described, for example, in Li et al., 2006 Proc. Natl. Acad Sci. U.S.A. 103:17337-42, and in US2007/0111963 and US2005/226848, each of which is incorporated herein by reference.

[0126] The terms “silence,” “inhibit expression of,” “down-regulate expression of,” “suppress expression of,” and the like, in so far as they refer to MYOC, herein refer to the at least partial suppression of the expression of MYOC, as assessed, e.g., based on MYOC mRNA expression, MYOC protein expression, or another parameter functionally linked to MYOC expression. For example, inhibition of MYOC expression may be manifested by a reduction of the amount of MYOC mRNA which may be isolated from or detected in a first cell or group of cells in which MYOC is transcribed and which has or have been treated such that the expression of MYOC is inhibited, as compared to a control. The control may be a second cell or group of cells substantially identical to the first cell or group of cells, except that the second cell or group of cells have not been so treated (control cells). The degree of inhibition is usually expressed as a percentage of a control level, e.g.,

$$\frac{( mRNA in control cells ) - ( mRNA in treated cells )}{( mRNA in control cells )} \cdot 100 \%$$

[0127] Alternatively, the degree of inhibition may be given in terms of a reduction of a parameter that is functionally linked to MYOC expression, e.g., the amount of protein encoded by a MYOC gene. The reduction of a parameter functionally linked to MYOC expression may similarly be expressed as a percentage of a control level. In principle, MYOC silencing may be determined in any cell expressing MYOC, either constitutively or by genomic engineering, and by any appropriate assay.

[0128] For example, in certain instances, expression of MYOC is suppressed by at least about 10%, 15%, 20%, 25%, 30%, 35%, 40%, 45%, or 50% by administration of an iRNA disclosed herein. In some embodiments, MYOC is suppressed by at least about 60%, 65%, 70%, 75%, or 80% by administration of an iRNA disclosed herein. In some embodiments, MYOC is suppressed by at least about 85%, 90%, 95%, 98%, 99%, or more by administration of an iRNA as described herein.

[0129] The term “antisense strand” or “guide strand” refers to the strand of an iRNA, e.g., a dsRNA, which includes a region that is substantially complementary to a target sequence.

[0130] As used herein, the term “region of complementarity” refers to the region on the antisense strand that is substantially complementary to a sequence, for example a target sequence, as defined herein. Where the region of complementarity is not fully complementary to the target sequence, the mismatches may be in the internal or terminal regions of the molecule. In some embodiments, the region of complementarity comprises 0, 1, or 2 mismatches.

[0131] The term “sense strand” or “passenger strand” as used herein, refers to the strand of an iRNA that includes a region that is substantially complementary to a region of the antisense strand as that term is defined herein.

[0132] The terms “blunt” or “blunt ended” as used herein in reference to a dsRNA mean that there are no unpaired nucleotides or nucleotide analogs at a given terminal end of a dsRNA, i.e., no nucleotide overhang. One or both ends of a dsRNA can be blunt. Where both ends of a dsRNA are blunt, the dsRNA is said to be blunt ended. To be clear, a “blunt ended” dsRNA is a dsRNA that is blunt at both ends, i.e., no nucleotide overhang at either end of the molecule. Most often such a molecule will be double-stranded over its entire length.

[0133] As used herein, and unless otherwise indicated, the term “complementary,” when used to describe a first nucleotide sequence in relation to a second nucleotide sequence, refers to the ability of an oligonucleotide or polynucleotide comprising the first nucleotide sequence to hybridize and form a duplex structure under certain conditions with an oligonucleotide or polynucleotide comprising the second nucleotide sequence, as will be understood by the skilled person. Such conditions can, for example, be stringent conditions, where stringent conditions may include: 400 mM NaCl, 40 mM PIPES pH 6.4, 1 mM EDTA, 50° C. or 70° C. for 12-16 hours followed by washing. Other conditions, such as physiologically relevant conditions as may be encountered inside an organism, can apply. The skilled person will be able to determine the set of conditions most appropriate for a test of complementarity of two sequences in accordance with the ultimate application of the hybridized nucleotides.

[0134] Complementary sequences within an iRNA, e.g., within a dsRNA as described herein, include base-pairing of the oligonucleotide or polynucleotide comprising a first nucleotide sequence to an oligonucleotide or polynucleotide comprising a second nucleotide sequence over the entire length of one or both nucleotide sequences. Such sequences can be referred to as “fully complementary” with respect to each other herein. However, where a first sequence is referred to as “substantially complementary” with respect to a second sequence herein, the two sequences can be fully complementary, or they may form one or more, but generally not more than 5, 4, 3 or 2 mismatched base pairs upon hybridization for a duplex up to 30 base pairs, while retaining the ability to hybridize under the conditions most relevant to their ultimate application, e.g., inhibition of gene expression via a RISC pathway. However, where two oligonucleotides are designed to form, upon hybridization, one or more single stranded overhangs, such overhangs shall not be regarded as mismatches with regard to the determination of complementarity. For example, a dsRNA comprising one oligonucleotide 21 nucleotides in length and another oligonucleotide 23 nucleotides in length, wherein the longer oligonucleotide comprises a sequence of 21 nucleotides that is fully complementary to the shorter oligonucleotide, may yet be referred to as “fully complementary” for the purposes described herein.

[0135] Complementary sequences, as used herein, may also include, or be formed entirely from, non-Watson-Crick base pairs and/or base pairs formed from non-natural and modified nucleotides, in as far as the above requirements with respect to their ability to hybridize are fulfilled. Such non-Watson-Crick base pairs includes, but are not limited to, G:U Wobble or Hoogstein base pairing.

[0136] The terms “complementary,” “fully complementary” and “substantially complementary” herein may be used with respect to the base matching between the sense strand and the antisense strand of a dsRNA, or between the antisense strand of an iRNA agent and a target sequence, as will be understood from the context of their use.

[0137] As used herein, a polynucleotide that is “substantially complementary to at least part of” a messenger RNA (mRNA) refers to a polynucleotide that is substantially complementary to a contiguous portion of the mRNA of interest (e.g., an mRNA encoding a MYOC protein). For example, a polynucleotide is complementary to at least a part of a MYOC mRNA if the sequence is substantially complementary to a non-interrupted portion of an mRNA encoding MYOC. The term “complementarity” refers to the capacity for pairing between nucleobases of a first nucleic acid and a second nucleic acid.

[0138] As used herein, the term “region of complementarity” refers to the region of one nucleotide sequence agent that is substantially complementary to another sequence, e.g., the region of a sense sequence and corresponding antisense sequence of a dsRNA, or the antisense strand of an iRNA and a target sequence, e.g., a MYOC nucleotide sequence, as defined herein. Where the region of complementarity is not fully complementary to the target sequence, the mismatches can be in the internal or terminal regions of the antisense strand of the iRNA. Generally, the most tolerated mismatches are in the terminal regions, e.g., within 5, 4, 3, or 2 nucleotides of the 5′- or 3′-terminus of the iRNA agent.

[0139] “Contacting,” as used herein, includes directly contacting a cell, as well as indirectly contacting a cell. For example, a cell within a subject may be contacted when a composition comprising an iRNA is administered (e.g., intraocularly, topically, or intravenously) to the subject.

[0140] “Introducing into a cell,” when referring to an iRNA, means facilitating or effecting uptake or absorption into the cell. Absorption or uptake of an iRNA can occur through unaided diffusive or active cellular processes, or by auxiliary agents or devices. The meaning of this term is not limited to cells in vitro; an iRNA may also be “introduced into a cell,” wherein the cell is part of a living organism. In such an instance, introduction into the cell will include the delivery to the organism. For example, for in vivo delivery, iRNA can be injected into a tissue site or administered systemically. In vivo delivery can also be by a β-glucan delivery system, such as those described in U.S. Pat. Nos. 5,032,401 and 5,607,677, and U.S. Publication No. 2005/0281781, which are hereby incorporated by reference in their entirety. In vitro introduction into a cell includes methods known in the art such as electroporation and lipofection. Further approaches are described herein below or known in the art. As used herein, a “disorder related to MYOC expression,” a “disease related to MYOC expression,” a “pathological process related to MYOC expression,” “a MYOC-associated disorder,” “a MYOC-associated disease,” or the like includes any condition, disorder, or disease in which MYOC expression is altered (e.g., decreased or increased relative to a reference level, e.g., a level characteristic of a non-diseased subject). In some embodiments, MYOC expression is decreased. In some embodiments, MYOC expression is increased. In some embodiments, the decrease or increase in MYOC expression is detectable in a tissue sample from the subject (e.g., in an aqueous ocular fluid sample). The decrease or increase may be assessed relative the level observed in the same individual prior to the development of the disorder or relative to other individual(s) who do not have the disorder. The decrease or increase may be limited to a particular organ, tissue, or region of the body (e.g., the eye). MYOC-associated disorders include, but are not limited to, glaucoma (e.g., primary open angle glaucoma (POAG)).

[0141] The term “glaucoma”, as used herein, means any disease of the eye that is caused by or associated with damage to the optic nerve. In some embodiments, the glaucoma is associated with elevated intraocular pressure. In some embodiments, the glaucoma is asymptomatic. In other embodiments, the glaucoma has one or more symptoms, e.g., loss of peripheral vision, tunnel vision, or blind spots. A non-limiting example of glaucoma that is treatable using methods provided herein is primary open angle glaucoma (POAG).

[0142] The term “double-stranded RNA,” “dsRNA,” or “siRNA” as used herein, refers to an iRNA that includes an RNA molecule or complex of molecules having a hybridized duplex region that comprises two anti-parallel and substantially complementary nucleic acid strands, which will be referred to as having “sense” and “antisense” orientations with respect to a target RNA. The duplex region can be of any length that permits specific degradation of a desired target RNA, e.g., through a RISC pathway, but will typically range from 9 to 36 base pairs in length, e.g., 15-30 base pairs in length. Considering a duplex between 9 and 36 base pairs, the duplex can be any length in this range, for example, 9, 10, 11, 12, 13, 14, 15, 16, 17, 18, 19, 20, 21, 22, 23, 24, 25, 26, 27, 28, 29, 30, 31, 32, 33, 34, 35, or 36 and any sub-range therein between, including, but not limited to 15-30 base pairs, 15-26 base pairs, 15-23 base pairs, 15-22 base pairs, 15-21 base pairs, 15-20 base pairs, 15-19 base pairs, 15-18 base pairs, 15-17 base pairs, 18-30 base pairs, 18-26 base pairs, 18-23 base pairs, 18-22 base pairs, 18-21 base pairs, 18-20 base pairs, 19-30 base pairs, 19-26 base pairs, 19-23 base pairs, 19-22 base pairs, 19-21 base pairs, 19-20 base pairs, 20-30 base pairs, 20-26 base pairs, 20-25 base pairs, 20-24 base pairs, 20-23 base pairs, 20-22 base pairs, 20-21 base pairs, 21-30 base pairs, 21-26 base pairs, 21-25 base pairs, 21-24 base pairs, 21-23 base pairs, or 21-22 base pairs. dsRNAs generated in the cell by processing with Dicer and similar enzymes are generally in the range of 19-22 base pairs in length. One strand of the duplex region of a dsDNA comprises a sequence that is substantially complementary to a region of a target RNA. The two strands forming the duplex structure can be from a single RNA molecule having at least one self-complementary region, or can be formed from two or more separate RNA molecules. Where the duplex region is formed from two strands of a single molecule, the molecule can have a duplex region separated by a single stranded chain of nucleotides (herein referred to as a “hairpin loop”) between the 3′-end of one strand and the 5′-end of the respective other strand forming the duplex structure. The hairpin loop can comprise at least one unpaired nucleotide; in some embodiments the hairpin loop can comprise at least 3, at least 4, at least 5, at least 6, at least 7, at least 8, at least 9, at least 10, at least 20, at least 23 or more unpaired nucleotides. Where the two substantially complementary strands of a dsRNA are comprised by separate RNA molecules, those molecules need not, but can be covalently connected. In some embodiments, the two strands are connected covalently by means other than a hairpin loop, and the connecting structure is a linker.

[0143] In some embodiments, the iRNA agent may be a “single-stranded siRNA” that is introduced into a cell or organism to inhibit a target mRNA. In some embodiments, single-stranded RNAi agents can bind to the RISC endonuclease Argonaute 2, which then cleaves the target mRNA. The single-stranded siRNAs are generally 15-30 nucleotides and are optionally chemically modified. The design and testing of single-stranded siRNAs are described in U.S. Pat. No. 8,101,348 and in Lima et al., (2012) Cell 150: 883-894, the entire contents of each of which are hereby incorporated herein by reference. Any of the antisense nucleotide sequences described herein (e.g., sequences provided in Tables 2A or 2B) may be used as a single-stranded siRNA as described herein and optionally as chemically modified, e.g., as described herein, e.g., by the methods described in Lima et al., (2012) Cell 150:883-894.

[0144] In some embodiments, an RNA interference agent includes a single stranded RNA that interacts with a target RNA sequence to direct the cleavage of the target RNA. Without wishing to be bound by theory, long double stranded RNA introduced into cells is broken down into siRNA by a Type III endonuclease known as Dicer (Sharp et al., Genes Dev. 2001, 15:485). Dicer, a ribonuclease-III-like enzyme, processes the dsRNA into 19-23 base pair short interfering RNAs with characteristic two base 3′ overhangs (Bernstein, et al., (2001) Nature 409:363). The siRNAs are then incorporated into an RNA-induced silencing complex (RISC) where one or more helicases unwind the siRNA duplex, enabling the complementary antisense strand to guide target recognition (Nykanen, et al., (2001) (Cell 107:309). Upon binding to the appropriate target mRNA, one or more endonucleases within the RISC cleaves the target to induce silencing (Elbashir, et al., (2001) Genes Dev. 15:188). Thus, in some embodiments, the disclosure relates to a single stranded RNA that promotes the formation of a RISC complex to effect silencing of the target gene.

[0145] “G,” “C,” “A,” “T” and “U” each generally stand for a nucleotide that contains guanine, cytosine, adenine, thymidine and uracil as a base, respectively. However, it will be understood that the terms “deoxyribonucleotide,” “ribonucleotide,” or “nucleotide” can also refer to a modified nucleotide, as further detailed below, or a surrogate replacement moiety. The skilled person is well aware that guanine, cytosine, adenine, and uracil may be replaced by other moieties without substantially altering the base pairing properties of an oligonucleotide comprising a nucleotide bearing such replacement moiety. For example, without limitation, a nucleotide comprising inosine as its base may base pair with nucleotides containing adenine, cytosine, or uracil. Hence, nucleotides containing uracil, guanine, or adenine may be replaced in the nucleotide sequences of dsRNA featured in the disclosure by a nucleotide containing, for example, inosine. In another example, adenine and cytosine anywhere in the oligonucleotide can be replaced with guanine and uracil, respectively to form G-U Wobble base pairing with the target mRNA. Sequences containing such replacement moieties are suitable for the compositions and methods featured in the disclosure.

[0146] As used herein, the term “iRNA,” “RNAi”, “iRNA agent,” or “RNAi agent” or “RNAi molecule” refers to an agent that contains RNA as that term is defined herein, and which mediates the targeted cleavage of an RNA transcript, e.g., via an RNA-induced silencing complex (RISC) pathway. In some embodiments, an iRNA as described herein effects inhibition of MYOC expression, e.g., in a cell or mammal. Inhibition of MYOC expression may be assessed based on a reduction in the level of MYOC mRNA or a reduction in the level of the MYOC protein.

[0147] The term “linker” or “linking group” means an organic moiety that connects two parts of a compound, e.g., covalently attaches two parts of a compound.

[0148] The term “lipophile” or “lipophilic moiety” broadly refers to any compound or chemical moiety having an affinity for lipids. One way to characterize the lipophilicity of the lipophilic moiety is by the octanol-water partition coefficient, logK_{ow}, where K_{ow} is the ratio of a chemical's concentration in the octanol-phase to its concentration in the aqueous phase of a two-phase system at equilibrium. The octanol-water partition coefficient is a laboratory-measured property of a substance. However, it may also be predicted by using coefficients attributed to the structural components of a chemical which are calculated using first-principle or empirical methods (see, for example, Tetko et al., J. Chem. Inf Comput. Sci. 41:1407-21 (2001), which is incorporated herein by reference in its entirety). It provides a thermodynamic measure of the tendency of the substance to prefer a non-aqueous or oily milieu rather than water (i.e. its hydrophilic/lipophilic balance). In principle, a chemical substance is lipophilic in character when its logK_{ow} exceeds 0. Typically, the lipophilic moiety possesses a logK_{ow} exceeding 1, exceeding 1.5, exceeding 2, exceeding 3, exceeding 4, exceeding 5, or exceeding 10. For instance, the logK_{ow} of 6-amino hexanol, for instance, is predicted to be approximately 0.7. Using the same method, the logK_{ow} of cholesteryl N-(hexan-6-ol) carbamate is predicted to be 10.7.

[0149] The lipophilicity of a molecule can change with respect to the functional group it carries. For instance, adding a hydroxyl group or amine group to the end of a lipophilic moiety can increase or decrease the partition coefficient (e.g., logK_{ow}) value of the lipophilic moiety.

[0150] Alternatively, the hydrophobicity of the double-stranded RNAi agent, conjugated to one or more lipophilic moieties, can be measured by its protein binding characteristics. For instance, in certain embodiments, the unbound fraction in the plasma protein binding assay of the double-stranded RNAi agent could be determined to positively correlate to the relative hydrophobicity of the double-stranded RNAi agent, which could then positively correlate to the silencing activity of the double-stranded RNAi agent.

[0151] In some embodiments, the plasma protein binding assay determined is an electrophoretic mobility shift assay (EMSA) using human serum albumin protein. An exemplary protocol of this binding assay is illustrated in detail in, e.g., PCT/US2019/031170. The hydrophobicity of the double-stranded RNAi agent, measured by fraction of unbound siRNA in the binding assay, exceeds 0.15, exceeds 0.2, exceeds 0.25, exceeds 0.3, exceeds 0.35, exceeds 0.4, exceeds 0.45, or exceeds 0.5 for an enhanced in vivo delivery of siRNA.

[0152] Accordingly, conjugating the lipophilic moieties to the internal position(s) of the double-stranded RNAi agent provides optimal hydrophobicity for the enhanced in vivo delivery of siRNA.

[0153] The term “lipid nanoparticle” or “LNP” is a vesicle comprising a lipid layer encapsulating a pharmaceutically active molecule, such as a nucleic acid molecule, e.g., a RNAi agent or a plasmid from which a RNAi agent is transcribed. LNPs are described in, for example, U.S. Pat. Nos. 6,858,225, 6,815,432, 8,158,601, and 8,058,069, the entire contents of which are hereby incorporated herein by reference.

[0154] As used herein, the term “modulate the expression of,” refers to an at least partial “inhibition” or partial “activation” of a gene (e.g., MYOC gene) expression in a cell treated with an iRNA composition as described herein compared to the expression of the corresponding gene in a control cell. A control cell includes an untreated cell, or a cell treated with a non-targeting control iRNA.

[0155] The skilled artisan will recognize that the term “RNA molecule” or “ribonucleic acid molecule” encompasses not only RNA molecules as expressed or found in nature, but also analogs and derivatives of RNA comprising one or more ribonucleotide/ribonucleoside analogs or derivatives as described herein or as known in the art. Strictly speaking, a “ribonucleoside” includes a nucleoside base and a ribose sugar, and a “ribonucleotide” is a ribonucleoside with one, two or three phosphate moieties or analogs thereof (e.g., phosphorothioate). However, the terms “ribonucleoside” and “ribonucleotide” can be considered to be equivalent as used herein. The RNA can be modified in the nucleobase structure, in the ribose structure, or in the ribose-phosphate backbone structure, e.g., as described herein below. However, the molecules comprising ribonucleoside analogs or derivatives must retain the ability to form a duplex. As non-limiting examples, an RNA molecule can also include at least one modified ribonucleoside including but not limited to a 2′-O-methyl modified nucleoside, a nucleoside comprising a 5′ phosphorothioate group, a terminal nucleoside linked to a cholesteryl derivative or dodecanoic acid bisdecylamide group, a locked nucleoside, an abasic nucleoside, an acyclic nucleoside, a glycol nucleotide, a 2′-deoxy-2′-fluoro modified nucleoside, a 2′-amino-modified nucleoside, 2′-alkyl-modified nucleoside, morpholino nucleoside, a phosphoramidate or a non-natural base comprising nucleoside, or any combination thereof. Alternatively, or in combination, an RNA molecule can comprise at least two modified ribonucleosides, at least 3, at least 4, at least 5, at least 6, at least 7, at least 8, at least 9, at least 10, at least 15, at least 20 or more, up to the entire length of the dsRNA molecule. The modifications need not be the same for each of such a plurality of modified ribonucleosides in an RNA molecule. In some embodiments, modified RNAs contemplated for use in methods and compositions described herein are peptide nucleic acids (PNAs) that have the ability to form the required duplex structure and that permit or mediate the specific degradation of a target RNA, e.g., via a RISC pathway. For clarity, it is understood that the term “iRNA” does not encompass a naturally occurring double stranded DNA molecule or a 100%/ deoxynucleoside-containing DNA molecule.

[0156] In some aspects, a modified ribonucleoside includes a deoxyribonucleoside. In such an instance, an iRNA agent can comprise one or more deoxynucleosides, including, for example, a deoxynucleoside overhang(s), or one or more deoxynucleosides within the double stranded portion of a dsRNA. In certain embodiments, the RNA molecule comprises a percentage of deoxyribonucleosides of at least 5, 10, 15, 20, 25, 30, 35, 40, 45, 50, 55, 60, 65, 70, 75, 80, 85, 90, 95% or higher (but not 100%) deoxyribonucleosides, e.g., in one or both strands.

[0157] As used herein, the term “nucleotide overhang” refers to at least one unpaired nucleotide that protrudes from the duplex structure of an iRNA, e.g., a dsRNA. For example, when a 3′-end of one strand of a dsRNA extends beyond the 5′-end of the other strand, or vice versa, there is a nucleotide overhang. A dsRNA can comprise an overhang of at least one nucleotide; alternatively, the overhang can comprise at least two nucleotides, at least three nucleotides, at least four nucleotides, or at least five nucleotides or more. A nucleotide overhang can comprise or consist of a nucleotide/nucleoside analog, including a deoxynucleotide/nucleoside. The overhang(s) may be on the sense strand, the antisense strand or any combination thereof. Furthermore, the nucleotide(s) of an overhang can be present on the 5′ end, 3′ end or both ends of either an antisense or sense strand of a dsRNA.

[0158] In some embodiments, the antisense strand of a dsRNA has a 1-10 nucleotide overhang at the 3′ end and/or the 5′ end. In some embodiments, the sense strand of a dsRNA has a 1-10 nucleotide overhang at the 3′ end and/or the 5′ end. In some embodiments, one or more of the nucleotides in the overhang is replaced with a nucleoside thiophosphate.

[0159] As used herein, a “pharmaceutical composition” comprises a pharmacologically effective amount of a therapeutic agent (e.g., an iRNA) and a pharmaceutically acceptable carrier. As used herein, “pharmacologically effective amount,” “therapeutically effective amount” or simply “effective amount” refers to that amount of an agent (e.g., iRNA) effective to produce the intended pharmacological, therapeutic or preventive result. For example, in a method of treating a disorder related to MYOC expression (e.g., glaucoma, e.g., primary open angle glaucoma (POAG)), an effective amount includes an amount effective to reduce one or more symptoms associated with the disorder (e.g., an amount effective to; (a) inhibit or reduce the expression or activity of MYOC; (b) reduce the level of misfolded MYOC protein; (c) reduce trabecular meshwork cell death; (d) decrease intraocular pressure; or (e) increase visual acuity. For example, if a given clinical treatment is considered effective when there is at least a 10% reduction in a measurable parameter associated with a disease or disorder, a therapeutically effective amount of a drug for the treatment of that disease or disorder is the amount necessary to obtain at least a 10/6 reduction in that parameter. For example, a therapeutically effective amount of an iRNA targeting MYOC can reduce a level of MYOC mRNA or a level of MYOC protein by any measurable amount, e.g., by at least 10%, 15%, 20%, 25%, 30%, 35%, 40%, 45%, 50%, 55%, 60%, 65%, 70%, 75%, 80%, 85%, 90%, or 95%.

[0160] The term “pharmaceutically acceptable carrier” refers to a carrier for administration of a therapeutic agent. Such carriers include, but are not limited to, saline, buffered saline, dextrose, water, glycerol, ethanol, and combinations thereof. The term specifically excludes cell culture medium. For drugs administered orally, pharmaceutically acceptable carriers include, but are not limited to pharmaceutically acceptable excipients such as inert diluents, disintegrating agents, binding agents, lubricating agents, sweetening agents, flavoring agents, coloring agents and preservatives. Suitable inert diluents include sodium and calcium carbonate, sodium and calcium phosphate, and lactose, while corn starch and alginic acid are suitable disintegrating agents. Binding agents may include starch and gelatin, while the lubricating agent, if present, will generally be magnesium stearate, stearic acid or talc. If desired, the tablets may be coated with a material such as glyceryl monostearate or glyceryl distearate, to delay absorption in the gastrointestinal tract. Agents included in drug formulations are described further herein below.

[0161] As used herein, the term “SNALP” refers to a stable nucleic acid-lipid particle. A SNALP represents a vesicle of lipids coating a reduced aqueous interior comprising a nucleic acid such as an iRNA or a plasmid from which an iRNA is transcribed. SNALPs are described, e.g., in U.S. Patent Application Publication Nos. 2006/0240093, 2007/0135372, and in International Application No. WO 2009/082817. These applications are incorporated herein by reference in their entirety. In some embodiments, the SNALP is a SPLP. As used herein, the term “SPLP” refers to a nucleic acid-lipid particle comprising plasmid DNA encapsulated within a lipid vesicle.

[0162] As used herein, the term “strand comprising a sequence” refers to an oligonucleotide comprising a chain of nucleotides that is described by the sequence referred to using the standard nucleotide nomenclature.

[0163] As used herein, a “subject” to be treated according to the methods described herein, includes a human or non-human animal, e.g., a mammal. The mammal may be, for example, a rodent (e.g., a rat or mouse) or a primate (e.g., a monkey). In some embodiments, the subject is a human.

[0164] A “subject in need thereof” includes a subject having, suspected of having, or at risk of developing a disorder related to MYOC expression, e.g., overexpression (e.g., glaucoma). In some embodiments, the subject has, or is suspected of having, a disorder related to MYOC expression or overexpression. In some embodiments, the subject is at risk of developing a disorder related to MYOC expression or overexpression.

[0165] As used herein, “target sequence” refers to a contiguous portion of the nucleotide sequence of an mRNA molecule formed during the transcription of a gene, e.g., MYOC, including mRNA that is a product of RNA processing of a primary transcription product. The target portion of the sequence will be at least long enough to serve as a substrate for iRNA-directed cleavage at or near that portion. For example, the target sequence will generally be from 9-36 nucleotides in length, e.g., 15-30 nucleotides in length, including all sub-ranges therebetween. As non-limiting examples, the target sequence can be from 15-30 nucleotides, 15-26 nucleotides, 15-23 nucleotides, 15-22 nucleotides, 15-21 nucleotides, 15-20 nucleotides, 15-19 nucleotides, 15-18 nucleotides, 15-17 nucleotides, 18-30 nucleotides, 18-26 nucleotides, 18-23 nucleotides, 18-22 nucleotides, 18-21 nucleotides, 18-20 nucleotides, 19-30 nucleotides, 19-26 nucleotides, 19-23 nucleotides, 19-22 nucleotides, 19-21 nucleotides, 19-20 nucleotides, 20-30 nucleotides, 20-26 nucleotides, 20-25 nucleotides, 20-24 nucleotides, 20-23 nucleotides, 20-22 nucleotides, 20-21 nucleotides, 21-30 nucleotides, 21-26 nucleotides, 21-25 nucleotides, 21-24 nucleotides, 21-23 nucleotides, or 21-22 nucleotides.

[0166] As used herein, the phrases “therapeutically effective amount” and “prophylactically effective amount” and the like refer to an amount that provides a therapeutic benefit in the treatment, prevention, or management of any disorder or pathological process related to MYOC expression (e.g., glaucoma, e.g., primary open angle glaucoma (POAG)). The specific amount that is therapeutically effective may vary depending on factors known in the art, such as, for example, the type of disorder or pathological process, the patient's history and age, the stage of the disorder or pathological process, and the administration of other therapies.

[0167] In the context of the present disclosure, the terms “treat,” “treatment,” and the like mean to prevent, delay, relieve or alleviate at least one symptom associated with a disorder related to MYOC expression, or to slow or reverse the progression or anticipated progression of such a disorder. For example, the methods featured herein, when employed to treat a glaucoma, may serve to reduce or prevent one or more symptoms of the glaucoma, as described herein, or to reduce the risk or severity of associated conditions. Thus, unless the context clearly indicates otherwise, the terms “treat,” “treatment,” and the like are intended to encompass prophylaxis, e.g., prevention of disorders and/or symptoms of disorders related to MYOC expression. Treatment can also mean prolonging survival as compared to expected survival in the absence of treatment.

[0168] By “lower” in the context of a disease marker or symptom is meant any decrease, e.g., a statistically or clinically significant decrease in such level. The decrease can be, for example, at least 10%, at least 20%, at least 30%, at least 40%, at least 40%, at least 50%, at least 60%, at least 70%, at least 80%, or at least 90%. The decrease can be down to a level accepted as within the range of normal for an individual without such disorder.

[0169] As used herein, “MYOC” refers to “myocilin” the corresponding mRNA (“MYOC mRNA”), or the corresponding protein (“MYOC protein”). The sequence of a human MYOC mRNA transcript can be found at SEQ ID NO: 1.

### II. IRNA AGENTS

[0170] Described herein are iRNA agents that modulate (e.g., inhibit) the expression of MYOC.

[0171] In some embodiments, the iRNA agent activates the expression of MYOC in a cell or mammal.

[0172] In some embodiments, the iRNA agent includes double-stranded ribonucleic acid (dsRNA) molecules for inhibiting the expression of MYOC in a cell or in a subject (e.g., in a mammal, e.g., in a human), where the dsRNA includes an antisense strand having a region of complementarity which is complementary to at least a part of an mRNA formed in the expression of MYOC, and where the region of complementarity is 30 nucleotides or less in length, generally 19-24 nucleotides in length, and where the dsRNA, upon contact with a cell expressing MYOC, inhibits the expression of MYOC, e.g., by at least 10%, 20%, 30%, 40%, or 50%.

[0173] The modulation (e.g., inhibition) of expression of MYOC can be assayed by, for example, a PCR or branched DNA (bDNA)-based method, or by a protein-based method, such as by Western blot. Expression of MYOC in cell culture, such as in COS cells, ARPE-19 cells, hTERT RPE-1 cells, HeLa cells, primary hepatocytes, HepG2 cells, primary cultured cells or in a biological sample from a subject can be assayed by measuring MYOC mRNA levels, such as by bDNA or TaqMan assay, or by measuring protein levels, such as by immunofluorescence analysis, using, for example, Western Blotting or flow cytometric techniques.

[0174] A dsRNA typically includes two RNA strands that are sufficiently complementary to hybridize to form a duplex structure under conditions in which the dsRNA will be used. One strand of a dsRNA (the antisense strand) typically includes a region of complementarity that is substantially complementary, and generally fully complementary, to a target sequence, derived from the sequence of an mRNA formed during the expression of MYOC. The other strand (the sense strand) typically includes a region that is complementary to the antisense strand, such that the two strands hybridize and form a duplex structure when combined under suitable conditions. Generally, the duplex structure is between 15 and 30 inclusive, more generally between 18 and 25 inclusive, yet more generally between 19 and 24 inclusive, and most generally between 19 and 21 base pairs in length, inclusive. Similarly, the region of complementarity to the target sequence is between 15 and 30 inclusive, more generally between 18 and 25 inclusive, yet more generally between 19 and 24 inclusive, and most generally between 19 and 21 nucleotides in length, inclusive.

[0175] In some embodiments, the dsRNA is between 15 and 20 nucleotides in length, inclusive, and in other embodiments, the dsRNA is between 25 and 30 nucleotides in length, inclusive. As the ordinarily skilled person will recognize, the targeted region of an RNA targeted for cleavage will most often be part of a larger RNA molecule, often an mRNA molecule. Where relevant, a “part” of an mRNA target is a contiguous sequence of an mRNA target of sufficient length to be a substrate for RNAi-directed cleavage (i.e., cleavage through a RISC pathway). dsRNAs having duplexes as short as 9 base pairs can, under some circumstances, mediate RNAi-directed RNA cleavage. Most often a target will be at least 15 nucleotides in length, e.g., 15-30 nucleotides in length.

[0176] One of skill in the art will also recognize that the duplex region is a primary functional portion of a dsRNA, e.g., a duplex region of 9 to 36, e.g., 15-30 base pairs. Thus, in some embodiments, to the extent that it becomes processed to a functional duplex of e.g., 15-30 base pairs that targets a desired RNA for cleavage, an RNA molecule or complex of RNA molecules having a duplex region greater than 30 base pairs is a dsRNA. Thus, an ordinarily skilled artisan will recognize that in some embodiments, then, an miRNA is a dsRNA. In some embodiments, a dsRNA is not a naturally occurring miRNA. In some embodiments, an iRNA agent useful to target MYOC expression is not generated in the target cell by cleavage of a larger dsRNA.

[0177] A dsRNA as described herein may further include one or more single-stranded nucleotide overhangs. The dsRNA can be synthesized by standard methods known in the art as further discussed below, e.g., by use of an automated DNA synthesizer, such as are commercially available from, for example, Biosearch, Applied Biosystems, Inc.

[0178] In some embodiments, MYOC is a human MYOC.

[0179] In specific embodiments, the dsRNA comprises a sense strand that comprises or consists of a sense sequence selected from the sense sequences provided in Tables 2A or 2B and an antisense strand that comprises or consists of an antisense sequence selected from the antisense sequences provided in Tables 2A or 2B.

[0180] In some aspects, a dsRNA will include at least sense and antisense nucleotide sequences, whereby the sense strand is selected from the sequences provided in Tables 2A or 2B and the corresponding antisense strand is selected from the sequences provided in Tables 2A or 2B.

[0181] In these aspects, one of the two sequences is complementary to the other of the two sequences, with one of the sequences being substantially complementary to a sequence of an mRNA generated by the expression of MYOC. As such, a dsRNA will include two oligonucleotides, where one oligonucleotide is described as the sense strand, and the second oligonucleotide is described as the corresponding antisense strand. As described elsewhere herein and as known in the art, the complementary sequences of a dsRNA can also be contained as self-complementary regions of a single nucleic acid molecule, as opposed to being on separate oligonucleotides.

[0182] The skilled person is well aware that dsRNAs having a duplex structure of between 20 and 23, but specifically 21, base pairs have been hailed as particularly effective in inducing RNA interference (Elbashir et al., EMBO 2001, 20:6877-6888). However, others have found that shorter or longer RNA duplex structures can be effective as well.

[0183] In the embodiments described above, by virtue of the nature of the oligonucleotide sequences provided in Tables 2A and 2B, dsRNAs described herein can include at least one strand of a length of minimally 19 nucleotides. It can be reasonably expected that shorter duplexes having one of the sequences of Tables 2A and 2B minus only a few nucleotides on one or both ends will be similarly effective as compared to the dsRNAs described above.

[0184] In some embodiments, the dsRNA has a partial sequence of at least 15, 16, 17, 18, 19, 20, or more contiguous nucleotides from one of the sequences of Tables 2A or 2B.

[0185] In some embodiments, the dsRNA has an antisense sequence that comprises at least 15, 16, 17, 18, or 19 contiguous nucleotides of an antisense sequence provided in Tables 2A or 2B and a sense sequence that comprises at least 15, 16, 17, 18, or 19 contiguous nucleotides of a corresponding sense sequence provided in Tables 2A or 2B.

[0186] In some embodiments, the dsRNA comprises an antisense sequence that comprises at least 15, 16, 17, 18, 19, 20, 21, 22, or 23 contiguous nucleotides of an antisense sequence provided in Tables 2A or 2B and a sense sequence that comprises at least 15, 16, 17, 18, 19, 20, or 21 contiguous nucleotides of a corresponding sense sequence provided in Tables 2A or 2B.

[0187] In some such embodiments, the dsRNA, although it comprises only a portion of the sequences provided in Tables 2A or 2B is equally effective in inhibiting a level of MYOC expression as is a dsRNA that comprises the full-length sequences provided in Tables 2A or 2B. In some embodiments, the dsRNA differs in its inhibition of a level of expression of MYOC by not more than 5, 10, 15, 20, 25, 30, 35, 40, 45, or 50% inhibition compared with a dsRNA comprising the full sequence disclosed herein.

[0188] In some embodiments, an iRNA described herein comprises an antisense strand comprising at least 15 contiguous nucleotides, with 0, 1, 2, or 3 mismatches, of a portion of nucleotide sequence of SEQ ID NO: 2. In some embodiments, an iRNA described herein comprises a sense strand comprising at least 15 contiguous nucleotides, with 0, or 1, 2, or 3 mismatches, of the corresponding portion of the nucleotide sequence of SEQ ID NO: 1.

[0189] A human MYOC mRNA may have the sequence of SEQ ID NO: 1 provided herein. Homo sapiens myocilin (MYOC), mRNA

(SEQ ID NO: 1)
GAGCCAGCAAGGCCACCCATCCAGGCACCTCTCAGCACAGCAGAGCTTTCCAGAGGAAGCCTCA
CCAAGCCTCTGCAATGAGGTTCTTCTGTGCACGTTGCTGCAGCTTTGGGCCTGAGATGCCAGCT
GTCCAGCTGCTGCTTCTGGCCTGCCTGGTGTGGGATGTGGGGGCCAGGACAGCTCAGCTCAGGA
AGGCCAATGACCAGAGTGGCCGATGCCAGTATACCTTCAGTGTGGCCAGTCCCAATGAATCCAG
CTGCCCAGAGCAGAGCCAGGCCATGTCAGTCATCCATAACTTACAGAGAGACAGCAGCACCCAA
CGCTTAGACCTGGAGGCCACCAAAGCTCGACTCAGCTCCCTGGAGAGCCTCCTCCACCAATTGA
CCTTGGACCAGGCTGCCAGGCCCCAGGAGACCCAGGAGGGGCTGCAGAGGGAGCTGGGCACCCT
GAGGCGGGAGCGGGACCAGCTGGAAACCCAAACCAGAGAGTTGGAGACTGCCTACAGCAACCTC
CTCCGAGACAAGTCAGTTCTGGAGGAAGAGAAGAAGCGACTAAGGCAAGAAAATGAGAATCTGG
CCAGGAGGTTGGAAAGCAGCAGCCAGGAGGTAGCAAGGCTGAGAAGGGGCCAGTGTCCCCAGAC
CCGAGACACTGCTCGGGCTGTGCCACCAGGCTCCAGAGAAGTTTCTACGTGGAATTTGGACACT
TTGGCCTTCCAGGAACTGAAGTCCGAGCTAACTGAAGTTCCTGCTTCCCGAATTTTGAAGGAGA
GCCCATCTGGCTATCTCAGGAGTGGAGAGGGAGACACCGGATGTGGAGAACTAGTTTGGGTAGG
AGAGCCTCTCACGCTGAGAACAGCAGAAACAATTACTGGCAAGTATGGTGTGTGGATGCGAGAC
CCCAAGCCCACCTACCCCTACACCCAGGAGACCACGTGGAGAATCGACACAGTTGGCACGGATG
TCCGCCAGGTTTTTGAGTATGACCTCATCAGCCAGTTTATGCAGGGCTACCCTTCTAAGGTTCA
CATACTGCCTAGGCCACTGGAAAGCACGGGTGCTGTGGTGTACTCGGGGAGCCTCTATTTCCAG
GGCGCTGAGTCCAGAACTGTCATAAGATATGAGCTGAATACCGAGACAGTGAAGGCTGAGAAGG
AAATCCCTGGAGCTGGCTACCACGGACAGTTCCCGTATTCTTGGGGTGGCTACACGGACATTGA
CTTGGCTGTGGATGAAGCAGGCCTCTGGGTCATTTACAGCACCGATGAGGCCAAAGGTGCCATT
GTCCTCTCCAAACTGAACCCAGAGAATCTGGAACTCGAACAAACCTGGGAGACAAACATCCGTA
AGCAGTCAGTCGCCAATGCCTTCATCATCTGTGGCACCTTGTACACCGTCAGCAGCTACACCTC
AGCAGATGCTACCGTCAACTTTGCTTATGACACAGGCACAGGTATCAGCAAGACCCTGACCATC
CCATTCAAGAACCGCTATAAGTACAGCAGCATGATTGACTACAACCCCCTGGAGAAGAAGCTCT
TTGCCTGGGACAACTTGAACATGGTCACTTATGACATCAAGCTCTCCAAGATGTGAAAAGCCTC
CAAGCTGTACAGGCAATGGCAGAAGGAGATGCTCAGGGCTCCTGGGGGGAGCAGGCTGAAGGGA
GAGCCAGCCAGCCAGGGCCCAGGCAGCTTTGACTGCTTTCCAAGTTTTCATTAATCCAGAAGGA
TGAACATGGTCACCATCTAACTATTCAGGAATTGTAGTCTGAGGGCGTAGACAATTTCATATAA
TAAATATCCTTTATCTTCTGTCAGCATTTATGGGATGTTTAATGACATAGTTCAAGTTTTCTTG
TGATTTGGGGCAAAAGCTGTAAGGCATAATAGTTTCTTCCTGAAAACCATTGCTCTTGCATGTT
ACATGGTTACCACAAGCCACAATAAAAAGCATAACTTCTAAAGGAAGCAGAATAGCTCCTCTGG
CCAGCATCGAATATAAGTAAGATGCATTTACTACAGTTGGCTTCTAATGCTTCAGATAGAATAC
AGTTGGGTCTCACATAACCCTTTACATTGTGAAATAAAATTTTCTTACCCAA

[0190] The reverse complement of SEQ ID NO: 1 is provided as SEQ ID NO: 2 herein:

(SEQ ID NO: 2)
TTGGGTAAGAAAATTTTATTTCACAATGTAAAGGGTTATGTGAGACCCAACTGTATTCTATCTG
AAGCATTAGAAGCCAACTGTAGTAAATGCATCTTACTTATATTCGATGCTGGCCAGAGGAGCTA
TTCTGCTTCCTTTAGAAGTTATGCTTTTTATTGTGGCTTGTGGTAACCATGTAACATGCAAGAG
CAATGGTTTTCAGGAAGAAACTATTATGCCTTACAGCTTTTGCCCCAAATCACAAGAAAACTTG
AACTATGTCATTAAACATCCCATAAATGCTGACAGAAGATAAAGGATATTTATTATATGAAATT
GTCTACGCCCTCAGACTACAATTCCTGAATAGTTAGATGGTGACCATGTTCATCCTTCTGGATT
AATGAAAACTTGGAAAGCAGTCAAAGCTGCCTGGGCCCTGGCTGGCTGGCTCTCCCTTCAGCCT
GCTCCCCCCAGGAGCCCTGAGCATCTCCTTCTGCCATTGCCTGTACAGCTTGGAGGCTTTTCAC
ATCTTGGAGAGCTTGATGTCATAAGTGACCATGTTCAAGTTGTCCCAGGCAAAGAGCTTCTTCT
CCAGGGGGTTGTAGTCAATCATGCTGCTGTACTTATAGCGGTTCTTGAATGGGATGGTCAGGGT
CTTGCTGATACCTGTGCCTGTGTCATAAGCAAAGTTGACGGTAGCATCTGCTGAGGTGTAGCTG
CTGACGGTGTACAAGGTGCCACAGATGATGAAGGCATTGGCGACTGACTGCTTACGGATGTTTG
TCTCCCAGGTTTGTTCGAGTTCCAGATTCTCTGGGTTCAGTTTGGAGAGGACAATGGCACCTTT
GGCCTCATCGGTGCTGTAAATGACCCAGAGGCCTGCTTCATCCACAGCCAAGTCAATGTCCGTG
TAGCCACCCCAAGAATACGGGAACTGTCCGTGGTAGCCAGCTCCAGGGATTTCCTTCTCAGCCT
TCACTGTCTCGGTATTCAGCTCATATCTTATGACAGTTCTGGACTCAGCGCCCTGGAAATAGAG
GCTCCCCGAGTACACCACAGCACCCGTGCTTTCCAGTGGCCTAGGCAGTATGTGAACCTTAGAA
GGGTAGCCCTGCATAAACTGGCTGATGAGGTCATACTCAAAAACCTGGCGGACATCCGTGCCAA
CTGTGTCGATTCTCCACGTGGTCTCCTGGGTGTAGGGGTAGGTGGGCTTGGGGTCTCGCATCCA
CACACCATACTTGCCAGTAATTGTTTCTGCTGTTCTCAGCGTGAGAGGCTCTCCTACCCAAACT
AGTTCTCCACATCCGGTGTCTCCCTCTCCACTCCTGAGATAGCCAGATGGGCTCTCCTTCAAAA
TTCGGGAAGCAGGAACTTCAGTTAGCTCGGACTTCAGTTCCTGGAAGGCCAAAGTGTCCAAATT
CCACGTAGAAACTTCTCTGGAGCCTGGTGGCACAGCCCGAGCAGTGTCTCGGGTCTGGGGACAC
TGGCCCCTTCTCAGCCTTGCTACCTCCTGGCTGCTGCTTTCCAACCTCCTGGCCAGATTCTCAT
TTTCTTGCCTTAGTCGCTTCTTCTCTTCCTCCAGAACTGACTTGTCTCGGAGGAGGTTGCTGTA
GGCAGTCTCCAACTCTCTGGTTTGGGTTTCCAGCTGGTCCCGCTCCCGCCTCAGGGTGCCCAGC
TCCCTCTGCAGCCCCTCCTGGGTCTCCTGGGGCCTGGCAGCCTGGTCCAAGGTCAATTGGTGGA
GGAGGCTCTCCAGGGAGCTGAGTCGAGCTTTGGTGGCCTCCAGGTCTAAGCGTTGGGTGCTGCT
GTCTCTCTGTAAGTTATGGATGACTGACATGGCCTGGCTCTGCTCTGGGCAGCTGGATTCATTG
GGACTGGCCACACTGAAGGTATACTGGCATCGGCCACTCTGGTCATTGGCCTTCCTGAGCTGAG
CTGTCCTGGCCCCCACATCCCACACCAGGCAGGCCAGAAGCAGCAGCTGGACAGCTGGCATCTC
AGGCCCAAAGCTGCAGCAACGTGCACAGAAGAACCTCATTGCAGAGGCTTGGTGAGGCTTCCTC
TGGAAAGCTCTGCTGTGCTGAGAGGTGCCTGGATGGGTGGCCTTGCTGGCTC

[0191] In some embodiments, an iRNA described herein includes at least 15 contiguous nucleotides from one of the sequences provided in Tables 2A and 2B, and may optionally be coupled to additional nucleotide sequences taken from the region contiguous to the selected sequence in MYOC.

[0192] While a target sequence is generally 15-30 nucleotides in length, there is wide variation in the suitability of particular sequences in this range for directing cleavage of any given target RNA. Various software packages and the guidelines set out herein provide guidance for the identification of optimal target sequences for any given gene target, but an empirical approach can also be taken in which a “window” or “mask” of a given size (as a non-limiting example, 21 nucleotides) is literally or figuratively (including, e.g., in silico) placed on the target RNA sequence to identify sequences in the size range that may serve as target sequences. By moving the sequence “window” progressively one nucleotide upstream or downstream of an initial target sequence location, the next potential target sequence can be identified, until the complete set of possible sequences is identified for any given target size selected. This process, coupled with systematic synthesis and testing of the identified sequences (using assays described herein or known in the art) to identify those sequences that perform optimally can identify those RNA sequences that, when targeted with an iRNA agent, mediate the best inhibition of target gene expression. Thus, it is contemplated that further optimization of inhibition efficiency can be achieved by progressively “walking the window” one nucleotide upstream or downstream of the given sequences to identify sequences with equal or better inhibition characteristics.

[0193] Further, it is contemplated that for any sequence identified, e.g., in Tables 2A and 2B, further optimization can be achieved by systematically either adding or removing nucleotides to generate longer or shorter sequences and testing those and sequences generated by walking a window of the longer or shorter size up or down the target RNA from that point. Again, coupling this approach to generating new candidate targets with testing for effectiveness of iRNAs based on those target sequences in an inhibition assay as known in the art or as described herein can lead to further improvements in the efficiency of inhibition. Further still, such optimized sequences can be adjusted by, e.g., the introduction of modified nucleotides as described herein or as known in the art, addition or changes in overhang, or other modifications as known in the art and/or discussed herein to further optimize the molecule (e.g., increasing serum stability or circulating half-life, increasing thermal stability, enhancing transmembrane delivery, targeting to a particular location or cell type, increasing interaction with silencing pathway enzymes, increasing release from endosomes, etc.) as an expression inhibitor.

[0194] In some embodiments, the disclosure provides an iRNA of Table 2B that is un-modified or un-conjugated. In some embodiments, an RNAi agent of the disclosure has a nucleotide sequence as provided in Table 2A, but lacks one or more ligand or moiety shown in the table. A ligand or moiety (e.g., a lipophilic ligand or moiety) can be included in any of the positions provided in the instant application.

[0195] An iRNA as described herein can contain one or more mismatches to the target sequence. In some embodiments, an iRNA as described herein contains no more than 3 mismatches. In some embodiments, when the antisense strand of the iRNA contains mismatches to a target sequence, the area of mismatch is not located in the center of the region of complementarity. In some embodiments, when the antisense strand of the iRNA contains mismatches to the target sequence, the mismatch is restricted to be within the last 5 nucleotides from either the 5′ or 3′ end of the region of complementarity. For example, for a 23 nucleotide iRNA agent RNA strand which is complementary to a region of MYOC, the RNA strand generally does not contain any mismatch within the central 13 nucleotides. The methods described herein, or methods known in the art can be used to determine whether an iRNA containing a mismatch to a target sequence is effective in inhibiting the expression of MYOC. Consideration of the efficacy of iRNAs with mismatches in inhibiting expression of MYOC is important, especially if the particular region of complementarity in a MYOC gene is known to have polymorphic sequence variation within the population.

[0196] In some embodiments, at least one end of a dsRNA has a single-stranded nucleotide overhang of 1 to 4, generally 1 or 2 nucleotides. In some embodiments, dsRNAs having at least one nucleotide overhang have superior inhibitory properties relative to their blunt-ended counterparts. In some embodiments, the RNA of an iRNA (e.g., a dsRNA) is chemically modified to enhance stability or other beneficial characteristics. The nucleic acids featured in the disclosure may be synthesized and/or modified by methods well established in the art, such as those described in “Current protocols in nucleic acid chemistry,” Beaucage, S. L. et al. (Edrs.), John Wiley & Sons, Inc., New York, NY, USA, which is hereby incorporated herein by reference. Modifications include, for example, (a) end modifications, e.g., 5′ end modifications (phosphorylation, conjugation, inverted linkages, etc.) 3′ end modifications (conjugation, DNA nucleotides, inverted linkages, etc.), (b) base modifications, e.g., replacement with stabilizing bases, destabilizing bases, or bases that base pair with an expanded repertoire of partners, removal of bases (abasic nucleotides), or conjugated bases, (c) sugar modifications (e.g., at the 2′ position or 4′ position, or having an acyclic sugar) or replacement of the sugar, as well as (d) backbone modifications, including modification or replacement of the phosphodiester linkages. Specific examples of RNA compounds useful in this disclosure include, but are not limited to, RNAs containing modified backbones or no natural internucleoside linkages. RNAs having modified backbones include, among others, those that do not have a phosphorus atom in the backbone. For the purposes of this specification, and as sometimes referenced in the art, modified RNAs that do not have a phosphorus atom in their internucleoside backbone can also be considered to be oligonucleosides. In particular embodiments, the modified RNA will have a phosphorus atom in its internucleoside backbone.

[0197] Modified RNA backbones include, for example, phosphorothioates, chiral phosphorothioates, phosphorodithioates, phosphotriesters, aminoalkylphosphotriesters, methyl and other alkyl phosphonates including 3′-alkylene phosphonates and chiral phosphonates, phosphinates, phosphoramidates including 3′-amino phosphoramidate and aminoalkylphosphoramidates, thionophosphoramidates, thionoalkylphosphonates, thionoalkylphosphotriesters, and boranophosphates having normal 3′-5′ linkages, 2′-5′ linked analogs of these, and those) having inverted polarity wherein the adjacent pairs of nucleoside units are linked 3′-5′ to 5′-3′ or 2′-5′ to 5′-2′. Various salts, mixed salts and free acid forms are also included.

[0198] Representative U.S. patents that teach the preparation of the above phosphorus-containing linkages include, but are not limited to, U.S. Pat. Nos. 3,687,808; 4,469,863; 4,476,301; 5,023,243; 5,177,195; 5,188,897; 5,264,423; 5,276,019; 5,278,302; 5,286,717; 5,321,131; 5,399,676; 5,405,939; 5,453,496; 5,455,233; 5,466,677; 5,476,925; 5,519,126; 5,536,821; 5,541,316; 5,550,111; 5,563,253; 5,571,799; 5,587,361; 5,625,050; 6,028,188; 6,124,445; 6,160,109; 6,169,170; 6,172,209; 6,239,265; 6,277,603; 6,326,199; 6,346,614; 6,444,423; 6,531,590; 6,534,639; 6,608,035; 6,683,167; 6,858,715; 6,867,294; 6,878,805; 7,015,315; 7,041,816; 7,273,933; 7,321,029; and U.S. Pat. RE39464, each of which is herein incorporated by reference.

[0199] Modified RNA backbones that do not include a phosphorus atom therein have backbones that are formed by short chain alkyl or cycloalkyl internucleoside linkages, mixed heteroatoms and alkyl or cycloalkyl internucleoside linkages, or one or more short chain heteroatomic or heterocyclic internucleoside linkages. These include those having morpholino linkages (formed in part from the sugar portion of a nucleoside); siloxane backbones; sulfide, sulfoxide and sulfone backbones; formacetyl and thioformacetyl backbones; methylene formacetyl and thioformacetyl backbones; alkene containing backbones; sulfamate backbones; methyleneimino and methylenehydrazino backbones; sulfonate and sulfonamide backbones; amide backbones; and others having mixed N, O, S and CH₂ component parts.

[0200] Representative U.S. patents that teach the preparation of the above oligonucleosides include, but are not limited to, U.S. Pat. Nos. 5,034,506; 5,166,315; 5,185,444; 5,214,134; 5,216,141; 5,235,033; 5,64,562; 5,264,564; 5,405,938; 5,434,257; 5,466,677; 5,470,967; 5,489,677; 5,541,307; 5,561,225; 5,596,086; 5,602,240; 5,608,046; 5,610,289; 5,618,704; 5,623,070; 5,663,312; 5,633,360; 5,677,437; and, 5,677,439, each of which is herein incorporated by reference.

[0201] In other RNA mimetics suitable or contemplated for use in iRNAs, both the sugar and the internucleoside linkage, i.e., the backbone, of the nucleotide units are replaced with novel groups. The base units are maintained for hybridization with an appropriate nucleic acid target compound. One such oligomeric compound, an RNA mimetic that has been shown to have excellent hybridization properties, is referred to as a peptide nucleic acid (PNA). In PNA compounds, the sugar backbone of an RNA is replaced with an amide containing backbone, in particular an aminoethylglycine backbone. The nucleobases are retained and are bound directly or indirectly to aza nitrogen atoms of the amide portion of the backbone. Representative U.S. patents that teach the preparation of PNA compounds include, but are not limited to, U.S. Pat. Nos. 5,539,082; 5,714,331; and 5,719,262, each of which is herein incorporated by reference. Further teaching of PNA compounds can be found, for example, in Nielsen et al., Science, 1991, 254, 1497-1500.

[0202] Some embodiments featured in the disclosure include RNAs with phosphorothioate backbones and oligonucleosides with heteroatom backbones, and in particular —CH₂—NH—CH₂—, —CH₂—N(CH₃)—O—CH₂— [known as a methylene (methylimino) or MMI backbone], —CH₂—O—N(CH₃)—CH₂—, —CH₂—N(CH₃)—N(CH₃)—CH₂— and —N(CH₃)—CH₂—CH₂— [wherein the native phosphodiester backbone is represented as —O—P—O—CH₂— ] of the above-referenced U.S. Pat. No. 5,489,677, and the amide backbones of the above-referenced U.S. Pat. No. 5,602,240. In some embodiments, the RNAs featured herein have morpholino backbone structures of the above-referenced U.S. Pat. No. 5,034,506.

[0203] Modified RNAs may also contain one or more substituted sugar moieties. The iRNAs, e.g., dsRNAs, featured herein can include one of the following at the 2′ position. OH; F; O-, S-, or N-alkyl; O-, S-, or N-alkenyl; O-, S- or N-alkynyl; or O-alkyl-O-alkyl, wherein the alkyl, alkenyl and alkynyl may be substituted or unsubstituted C₁ to C₁₀ alkyl or C₂ to C₁₀ alkenyl and alkynyl. Exemplary suitable modifications include O[(CH₂)ₙO]ₘCH₃, O(CH₂)·ₙOCH₃, O(CH₂)ₙNH₂, O(CH₂)ₙCH₃, O(CH₂)ₙONH₂, and O(CH₂)ₙON[(CH₂)ₙCH₃)]₂, where n and m are from 1 to about 10. In other embodiments, dsRNAs include one of the following at the 2′ position: C₁ to C₁₀ lower alkyl, substituted lower alkyl, alkaryl, aralkyl, O-alkaryl or O-aralkyl, SH, SCH₃, OCN, Cl, Br, CN, CF₃, OCF₃, SOCH₃, SO₂CH₃, ONO₂, NO₂, N₃, NH₂, heterocycloalkyl, heterocycloalkaryl, aminoalkylamino, polyalkylamino, substituted silyl, an RNA cleaving group, a reporter group, an intercalator, a group for improving the pharmacokinetic properties of an iRNA, or a group for improving the pharmacodynamic properties of an iRNA, and other substituents having similar properties. In some embodiments, the modification includes a 2′-methoxyethoxy (2′-O—CH₂CH₂OCH₃, also known as 2′-O-(2-methoxyethyl) or 2′-MOE) (Martin et al., Helv. Chim. Acta, 1995, 78:486-504) i.e., an alkoxy-alkoxy group. Another exemplary modification is 2′-dimethylaminooxyethoxy, i.e., a O(CH₂)₂ON(CH₃)₂ group, also known as 2′-DMAOE, and 2′-dimethylaminoethoxyethoxy (also known in the art as 2′-O-dimethylaminoethoxyethyl or 2′-DMAEOE), i.e., 2′-O—CH₂—O—CH₂—N(CH₂)₂.

[0204] In other embodiments, an iRNA agent comprises one or more (e.g., about 1, 2, 3, 4, 5, 6, 7, 8, 9, 10, or more) acyclic nucleotides (or nucleosides). In certain embodiments, the sense strand or the antisense strand, or both sense strand and antisense strand, include less than five acyclic nucleotides per strand (e.g., four, three, two or one acyclic nucleotides per strand). The one or more acyclic nucleotides can be found, for example, in the double-stranded region, of the sense or antisense strand, or both strands; at the 5′-end, the 3′-end, both of the 5′ and 3′-ends of the sense or antisense strand, or both strands, of the iRNA agent. In some embodiments, one or more acyclic nucleotides are present at positions 1 to 8 of the sense or antisense strand, or both. In some embodiments, one or more acyclic nucleotides are found in the antisense strand at positions 4 to 10 (e.g., positions 6-8) from the 5′-end of the antisense strand. In some embodiments, the one or more acyclic nucleotides are found at one or both 3′-terminal overhangs of the iRNA agent.

[0205] The term “acyclic nucleotide” or “acyclic nucleoside” as used herein refers to any nucleotide or nucleoside having an acyclic sugar, e.g., an acyclic ribose. An exemplary acyclic nucleotide or nucleoside can include a nucleobase, e.g., a naturally occurring or a modified nucleobase (e.g., a nucleobase as described herein). In certain embodiments, a bond between any of the ribose carbons (C1, C2, C3, C4, or C5), is independently or in combination absent from the nucleotide. In some embodiments, the bond between C2-C3 carbons of the ribose ring is absent, e.g., an acyclic 2′-3′-seco-nucleotide monomer. In other embodiments, the bond between C1-C2, C3-C4, or C4-C5 is absent (e.g., a 1′-2′, 3′-4′ or 4′-5′-seco nucleotide monomer). Exemplary acyclic nucleotides are disclosed in U.S. Pat. No. 8,314,227, incorporated herein by reference in its entirely. For example, an acyclic nucleotide can include any of monomers D-J in FIGS. 1-2 of U.S. Pat. No. 8,314,227. In some embodiments, the acyclic nucleotide includes the following monomer:

[chemical structure]

[0206] wherein Base is a nucleobase, e.g., a naturally occurring or a modified nucleobase (e.g., a nucleobase as described herein).

[0207] In certain embodiments, the acyclic nucleotide can be modified or derivatized, e.g., by coupling the acyclic nucleotide to another moiety, e.g., a ligand (e.g., a GalNAc, a cholesterol ligand), an alkyl, a polyamine, a sugar, a polypeptide, among others.

[0208] In other embodiments, the iRNA agent includes one or more acyclic nucleotides and one or more LNAs (e.g., an LNA as described herein). For example, one or more acyclic nucleotides and/or one or more LNAs can be present in the sense strand, the antisense strand, or both. The number of acyclic nucleotides in one strand can be the same or different from the number of LNAs in the opposing strand. In certain embodiments, the sense strand and/or the antisense strand comprises less than five LNAs (e.g., four, three, two or one LNAs) located in the double stranded region or a 3′-overhang. In other embodiments, one or two LNAs are located in the double stranded region or the 3′-overhang of the sense strand. Alternatively, or in combination, the sense strand and/or antisense strand comprises less than five acyclic nucleotides (e.g., four, three, two or one acyclic nucleotides) in the double-stranded region or a 3′-overhang. In some embodiments, the sense strand of the iRNA agent comprises one or two LNAs in the 3′-overhang of the sense strand, and one or two acyclic nucleotides in the double-stranded region of the antisense strand (e.g., at positions 4 to 10 (e.g., positions 6-8) from the 5′-end of the antisense strand) of the iRNA agent.

[0209] In other embodiments, inclusion of one or more acyclic nucleotides (alone or in addition to one or more LNAs) in the iRNA agent results in one or more (or all) of: (i) a reduction in an off-target effect; (ii) a reduction in passenger strand participation in RNAi; (iii) an increase in specificity of the guide strand for its target mRNA; (iv) a reduction in a microRNA off-target effect; (v) an increase in stability; or (vi) an increase in resistance to degradation, of the iRNA molecule.

[0210] Other modifications include 2′-methoxy (2′-OCH₃), 2′-5 aminopropoxy (2′-OCH₂CH₂CH₂NH₂) and 2′-fluoro (2′-F). Similar modifications may also be made at other positions on the RNA of an iRNA, particularly the 3′ position of the sugar on the 3′ terminal nucleotide or in 2′-5′ linked dsRNAs and the 5′ position of 5′ terminal nucleotide. iRNAs may also have sugar mimetics such as cyclobutyl moieties in place of the pentofuranosyl sugar. Representative U.S. patents that teach the preparation of such modified sugar structures include, but are not limited to, U.S. Pat. Nos. 4,981,957; 5,118,800; 5,319,080; 5,359,044; 5,393,878; 5,446,137; 5,466,786; 5,514,785; 5,519,134; 5,567,811; 5,576,427; 5,591,722; 5,597,909; 5,610,300; 5,627,053; 5,639,873; 5,646,265; 5,658,873; 5,670,633; and 5,700,920, certain of which are commonly owned with the instant application, and each of which is herein incorporated by reference.

[0211] An iRNA may also include nucleobase (often referred to in the art simply as “base”) modifications or substitutions. As used herein, “unmodified” or “natural” nucleobases include the purine bases adenine (A) and guanine (G), and the pyrimidine bases thymine (T), cytosine (C) and uracil (U). Modified nucleobases include other synthetic and natural nucleobases such as 5-methylcytosine (5-me-C), 5-hydroxymethyl cytosine, xanthine, hypoxanthine, 2-aminoadenine, 6-methyl and other alkyl derivatives of adenine and guanine, 2-propyl and other alkyl derivatives of adenine and guanine, 2-thiouracil, 2-thiothymine and 2-thiocytosine, 5-halouracil and cytosine, 5-propynyl uracil and cytosine, 6-azo uracil, cytosine and thymine, 5-uracil (pseudouracil), 4-thiouracil, 8-halo, 8-amino, 8-thiol, 8-thioalkyl, 8-hydroxyl anal other 8-substituted adenines and guanines, 5-halo, particularly 5-bromo, 5-trifluoromethyl and other 5-substituted uracils and cytosines, 7-methylguanine and 7-methyladenine, 8-azaguanine and 8-azaadenine, 7-deazaguanine and 7-daazaadenine and 3-deazaguanine and 3-deazaadenine.

[0212] Further nucleobases include those disclosed in U.S. Pat. No. 3,687,808, those disclosed in Modified Nucleosides in Biochemistry, Biotechnology and Medicine, Herdewijn, P. ed. Wiley-VCH, 2008; those disclosed in The Concise Encyclopedia of Polymer Science and Engineering, pages 858-859, Kroschwitz, J. L, ed. John Wiley & Sons, 1990, these disclosed by Englisch el al., Angeusandte Chemie, International Edition, 1991, 30, 613, and those disclosed by Sanghvi, Y S., Chapter 15, dsRNA Research and Applications, pages 289-302, Crooke, S. T. and Lebleu, B., Ed., CRC Press, 1993. Certain of these nucleobases are particularly useful for increasing the binding affinity of the oligomeric compounds featured in the disclosure. These include 5-substituted pyrimidines, 6-azapyrimidines and N-2, N-6 and 0-6 substituted purines, including 2-aminopropyladenine, 5-propynyluracil and 5-propynylcytosine. 5-methylcytosine substitutions have been shown to increase nucleic acid duplex stability by 0.6-1.2° C. (Sanghvi, Y. S., Crooke, S. T. and Lebleu, B., Eds., dsRNA Research and Applications, CRC Press, Boca Raton, 1993, pp. 276-278) and are exemplary base substitutions, even more particularly when combined with 2′-O-methoxyethyl sugar modifications.

[0213] Representative U.S. patents that teach the preparation of certain of the above noted modified nucleobases as well as other modified nucleobases include, but are not limited to, the above noted U.S. Pat. No. 3,687,808, as well as U.S. Pat. Nos. 4,845,205; 5,130,30; 5,134,066; 5,175,273; 5,367,066; 5,432,272; 5,457,187: 5,459,255; 5,484,908; 5,502,177: 5,525,711; 5,552,540; 5,587,469; 5,594,121, 5,596,091; 5,614,617; 5,681,941; 6,015,886; 6,147,200; 6,166,197; 6,222,025; 6,235,887; 6,380,368; 6,528,640; 6,639,062; 6,617,438; 7,045,610; 7,427,672; and 7,495,088, each of which is herein incorporated by reference, and U.S. Pat. No. 5,750,692, also herein incorporated by reference.

[0214] The RNA of an iRNA can also be modified to include one or more (e.g., about 1, 2, 3, 4, 5, 6, 7, 8, 9, 10, or more) bicyclic sugar moieties. A “bicyclic sugar” is a furanosyl ring modified by the bridging of two atoms. A “bicyclic nucleoside” (“BNA”) is a nucleoside having a sugar moiety comprising a bridge connecting two carbon atoms of the sugar ring, thereby forming a bicyclic ring system. In certain embodiments, the bridge connects the 4′-carbon and the 2′-carbon of the sugar ring. Thus, in some embodiments an agent of the disclosure may include one or more locked nucleic acids (LNAs) (also referred to herein as “locked nucleotides”). In some embodiments, a locked nucleic acid is a nucleotide having a modified ribose moiety in which the ribose moiety comprises an extra bridge connecting, e.g., the 2′ and 4′ carbons. This structure effectively “locks” the ribose in the 3′-endo structural conformation. The addition of locked nucleic acids to siRNAs has been shown to increase siRNA stability in serum, increase thermal stability, and to reduce off-target effects (Elmen, J. et al., (2005) Nucleic Acids Research 33(1):439-447; Mook, O R. et al., (2007) Mol Canc Ther 6(3):833-843; Grunweller, A. et al., (2003) Nucleic Acids Research 31(12):3185-3193).

[0215] Examples of bicyclic nucleosides for use in the polynucleotides of the disclosure include without limitation nucleosides comprising a bridge between the 4′ and the 2′ ribosyl ring atoms. In certain embodiments, the antisense polynucleotide agents of the disclosure include one or more bicyclic nucleosides comprising a 4′ to 2′ bridge. Examples of such 4′ to 2′ bridged bicyclic nucleosides, include but are not limited to 4′-(CH2)-O-2′ (LNA); 4′-(CH2)-S-2′; 4′-(CH2)2-O-2′ (ENA); 4′-CH(CH3)-O-2′ (also referred to as “constrained ethyl” or “cEt”) and 4′-CH(CH2OCH₃)—O-2′ (and analogs thereof; see, e.g., U.S. Pat. No. 7,399,845); 4′-C(CH3)(CH3)-O-2′ (and analogs thereof; see e.g., U.S. Pat. No. 8,278,283); 4′-CH₂—N(OCH3)-2′ (and analogs thereof; see e.g., U.S. Pat. No. 8,278,425); 4′-CH2-O—N(CH3)-2′ (see, e.g., U.S. Patent Publication No. 2004/0171570); 4′-CH2-N(R)—O-2′, wherein R is H, C1-C12 alkyl, or a protecting group (see, e.g., U.S. Pat. No. 7,427,672); 4′-CH2-C(H)(CH3)-2′ (see, e.g., Chattopadhyaya et al., J. Org. Chem., 2009, 74, 118-134); and 4′-CH2-C(═CH2)-2′ (and analogs thereof; see, e.g., U.S. Pat. No. 8,278,426). The contents of each of the foregoing are incorporated herein by reference for the methods provided therein. Representative U.S. Patents that teach the preparation of locked nucleic acids include, but are not limited to, the following: U.S. Pat. Nos. 6,268,490; 6,670,461; 6,794,499; 6,998,484; 7,053,207; 7,084,125; 7,399,845, and 8,314,227, each of which is herein incorporated by reference in its entirety. Exemplary LNAs include but are not limited to, a 2′, 4′-C methylene bicyclo nucleotide (see for example Wengel et al., International PCT 5 Publication No. WO 00/66604 and WO 99/14226).

[0216] Any of the foregoing bicyclic nucleosides can be prepared having one or more stereochemical sugar configurations including for example α-L-ribofuranose and β-D-ribofuranose (see WO 99/14226).

[0217] A RNAi agent of the disclosure can also be modified to include one or more constrained ethyl nucleotides. As used herein, a “constrained ethyl nucleotide” or “cEt” is a locked nucleic acid comprising a bicyclic sugar moiety comprising a 4′-CH(CH3)-0-2′ bridge. In some embodiments, a constrained ethyl nucleotide is in the S conformation referred to herein as “S-cEt.”

[0218] A RNAi agent of the disclosure may also include one or more “conformationally restricted nucleotides” (“CRN”). CRN are nucleotide analogs with a linker connecting the C2′ and C4′ carbons of ribose or the C3′ and —C5′ carbons of ribose. CRN lock the ribose ring into a stable conformation and increase the hybridization affinity to mRNA. The linker is of sufficient length to place the oxygen in an optimal position for stability and affinity resulting in less ribose ring puckering.

[0219] Representative publications that teach the preparation of certain of the above noted CRN include, but are not limited to, US 2013/0190383; and WO 2013/036868, the contents of each of which are hereby incorporated herein by reference for the methods provided therein.

[0220] In some embodiments, a RNAi agent of the disclosure comprises one or more monomers that are UNA (unlocked nucleic acid) nucleotides. UNA is unlocked acyclic nucleic acid, wherein any of the bonds of the sugar has been removed, forming an unlocked “sugar” residue. In one example, UNA also encompasses monomer with bonds between C1′-C4′ have been removed (i.e. the covalent carbon-oxygen-carbon bond between the C1′ and C4′ carbons). In another example, the C2′-C3′ bond (i.e. the covalent carbon-carbon bond between the C2′ and C3′ carbons) of the sugar has been removed (see Nuc. Acids Symp. Series, 52, 133-134 (2008) and Fluiter et al., Mol. Biosyst., 2009, 10, 1039).

[0221] Representative U.S. publications that teach the preparation of UNA include, but are not limited to, U.S. Pat. No. 8,314,227; and US Patent Publication Nos. 2013/0096289; 2013/0011922; and 2011/0313020, the contents of each of which are hereby incorporated herein by reference for the methods provided therein.

[0222] In other embodiments, the iRNA agents include one or more (e.g., about 1, 2, 3, 4, 5, 6, 7, 8, 9, 10, or more) G-clamp nucleotides. A G-clamp nucleotide is a modified cytosine analog wherein the modifications confer the ability to hydrogen bond both Watson-Crick and Hoogsteen faces of a complementary guanine within a duplex, see for example Lin and Matteucci, 1998, J. Am. Chem. Soc., 120, 8531-8532. A single G-clamp analog substitution within an oligonucleotide can result in substantially enhanced helical thermal stability and mismatch discrimination when hybridized to complementary oligonucleotides. The inclusion of such nucleotides in the iRNA molecules can result in enhanced affinity and specificity to nucleic acid targets, complementary sequences, or template strands.

[0223] Potentially stabilizing modifications to the ends of RNA molecules can include N-(acetylaminocaproyl)-4-hydroxyprolinol (Hyp-C6-NHAc), N-(caproyl-4-hydroxyprolinol (Hyp-C6), N-(acetyl-4-hydroxyprolinol (Hyp-NHAc), thymidine-2′-O-deoxythymidine (ether), N-(aminocaproyl)-4-hydroxyprolinol (Hyp-C6-amino), 2-docosanoyl-uridine-3″ phosphate, inverted base dT(idT) and others. Disclosure of this modification can be found in PCT Publication No. WO 2011/005861.

[0224] Other modifications of a RNAi agent of the disclosure include a 5′ phosphate or 5′ phosphate mimic, e.g., a 5′-terminal phosphate or phosphate mimic on the antisense strand of a RNAi agent. Suitable phosphate mimics are disclosed in, for example US 2012/0157511, the contents of which are incorporated herein by reference for the methods provided therein. In one embodiment, the double stranded RNAi agent of the invention further comprises a 5′-phosphate or a 5′-phosphate mimic at the 5′ nucleotide of the antisense strand. In another embodiment, the double stranded RNAi agent further comprises a 5′-phosphate mimic at the 5′ nucleotide of the antisense strand. In a specific embodiment, the 5′-phosphate mimic is a 5′-vinyl phosphonate (5′-VP). In one embodiment, the phosphate mimic is a 5′-cyclopropyl phosphonate (VP). In some embodiments, the 5′-end of the antisense strand of the double-stranded iRNA agent does not contain a 5′-vinyl phosphonate (VP).

[0225] In one embodiment, at least one of the modified nucleotides is selected from the group consisting of a deoxy-nucleotide, a 2′-O-methyl modified nucleotide, a 2′-fluoro modified nucleotide, a 2′-deoxy-modified nucleotide, a glycol modified nucleotide (GNA), e.g., Ggn, Cgn, Tgn, or Agn, a nucleotide with a 2′ phosphate, e.g., G2p, C2p, A2p or U2p, and, a vinyl-phosphonate nucleotide; and combinations thereof. In other embodiments, each of the duplexes of Tables 5 and 6 may be particularly modified to provide another double-stranded iRNA agent of the present disclosure. In one example, the 3′-terminus of each sense duplex may be modified by removing the 3′-terminal L96 ligand and exchanging the two phosphodiester internucleotide linkages between the three 3′-terminal nucleotides with phosphorothioate internucleotide linkages. That is, the three 3′-terminal nucleotides (N) of a sense sequence of the formula:
[0226] 5′-N1- . . . -Nn-2Nn-1NnL96 3′
   may be replaced with
[0227] 5′-N1- . . . -Nn-2sNn-1sNn 3′.

[0228] An RNA target may have regions, or spans of the target RNA's nucleotide sequence, which are relatively more susceptible or amenable than other regions of the RNA target to mediating cleavage of the RNA target via RNA interference induced by the binding of an RNAi agent to that region. The increased susceptibility to RNA interference within such “hotspot regions” (or simply “hotspots”) means that iRNA agents targeting the region will likely have higher efficacy in inducing iRNA interference than iRNA agents which target other regions of the target RNA. For example, without being bound by theory, the accessibility of a target region of a target RNA may influence the efficacy of iRNA agents which target that region, with some hotspot regions having increased accessibility. Secondary structures, for instance, that form in the RNA target (e.g., within or proximate to hotspot regions) may affect the ability of the iRNA agent to bind the target region and induce RNA interference.

[0229] According to certain aspects of the invention, an iRNA agent may be designed to target a hotspot region of any of the target RNAs described herein, including any identified portions of a target RNA (e.g., a particular exon). As used herein, a hotspot region may refer to an approximately 19-200, 19-150, 19-100, 19-75, 19-50, 21-200, 21-150, 21-100, 21-75, 21-50, 50-200, 50-150, 50-100, 50-75, 75-200, 75-150, 75-100, 100-200, or 100-150 nucleotide region of a target RNA sequence for which targeting using RNAi agents provides an observably higher probability of efficacious silencing relative to targeting other regions of the same target RNA. According to certain aspects of the invention, a hotspot region may comprise a limited region of the target RNA, and in some cases, a substantially limited region of the target, including for example, less than half of the length of the target RNA, such as about 5%, 10%, 15%, 20%, 25%, or 30% of the length of the target RNA. Conversely, the other regions against which a hotspot is compared may cumulatively comprise at least a majority of the length of the target RNA. For example, the other regions may cumulatively comprise at least about 60%, or at least about 70%, or at least about 80%, or at least about 90%, or at least about 95% of the length of the target RNA.

[0230] Compared regions of the target RNA may be empirically evaluated for identification of hotspots using efficacy data obtained from in vitro or in vivo screening assays. For example, RNAi agents targeting various regions that span a target RNA may be compared for frequency of efficacious iRNA agents (e.g., the amount by which target gene expression is inhibited, such as measured by mRNA expression or protein expression) that bind each region. In general, a hotspot can be recognized by observing clustering of multiple efficacious RNAi agents that bind to a limited region of the RNA target. A hotspot may be sufficiently characterized as such by observing efficacy of iRNA agents which cumulatively span at least about 60% of the target region identified as a hotspot, such as about 70%, about 80%, about 90%, or about 95% or more of the length of the region, including both ends of the region (i.e. at least about 60%, 70%, 80%, 90%, or 95% or more of the nucleotides within the region, including the nucleotides at each end of the region, were targeted by an iRNA agent). According to some aspects of the invention, an iRNA agent which demonstrates at least about 50%, 55%, 60%, 65%, 70%, 75%, 80%, 85%, 90%, or 95% inhibition over the region (e.g., no more than about 50%, 45%, 40%, 35%, 30%, 25%, 20%, 15%, 10%, or 5% mRNA remaining) may be identified as efficacious.

[0231] Amenability to targeting of RNA regions may also be assessed using quantitative comparison of inhibition measurements across different regions of a defined size (e.g, 25, 30, 40, 50, 60, 70, 80, 90, or 100, 110, 120, 130, 140, 150, 160, 170, 180, 190, or 200 nts). For example, an average level of inhibition may be determined for each region and the averages of each region may be compared. The average level of inhibition within a hotspot region may be substantially higher than the average of averages for all evaluated regions. According to some aspects, the average level of inhibition in a hotspot region may be at least about 10%, 20%, 30%, 40%, or 50% higher than the average of averages. According to some aspects, the average level of inhibition in a hotspot region may be at least about 1.0, 1.1, 1.2, 1.3, 1.4, 1.5 1.6, 1.7, 1.8. 1.9, or 2.0 standard deviations above the average of averages. The average level of inhibition may be higher by a statistically significant (e.g., p<0.05) amount. According to some aspects, each inhibition measurement within a hotspot region may be above a threshold amount (e.g., at or below a threshold amount of mRNA remaining). According to some aspects, each inhibition measurement within the region may be substantially higher than an average of all inhibition measurements across all the measured regions. For example, each inhibition measurement in a hotspot region may be at least about 10%, 20%, 30%, 40%, or 50% higher than the average of all inhibition measurements. According to some aspects, each inhibition measurement may be at least about 1.0, 1.1, 1.2, 1.3, 1.4, 1.5 1.6, 1.7, 1.8. 1.9, or 2.0 standard deviations above the average of all inhibition measurements. Each inhibition measurement may be higher by a statistically significant (e.g., p<0.05) amount than the average of all inhibition measurements. A standard for evaluating a hotspot may comprise various combinations of the above standards where compatible (e.g., an average level of inhibition of at least about a first amount and having no inhibition measurements below a threshold level of a second amount, lesser than the first amount).

[0232] It is therefore expressly contemplated that any iRNA agent, including the specific exemplary iRNA agents described herein, which targets a hotspot region of a target RNA, may be preferably selected for inducing RNA interference of the target mRNA as targeting such a hotspot region is likely to exhibit a robust inhibitory response relative to targeting a region which is not a hotspot region. RNAi agents targeting target sequences that substantially overlap (e.g., by at least about 70%, 75%, 80%, 85%, 90%, 95% of the target sequence length) or, preferably, that reside fully within the hotspot region may be considered to target the hotspot region. Hotspot regions of the RNA target(s) of the instant invention may include any region for which the data disclosed herein demonstrates higher frequency of targeting by efficacious RNAi agents, including by any of the standards described elsewhere herein, whether or not the range(s) of such hotspot region(s) are explicitly specified.

[0233] In various embodiments, a dsRNA agent of the present invention targets a hotspot region of an mRNA encoding MYOC.

### III. IRNA MOTIFS

[0234] In certain aspects of the disclosure, the double-stranded RNAi agents of the disclosure include agents with chemical modifications as disclosed, for example, in WO 2013/075035, the contents of which are incorporated herein by reference for the methods provided therein. As shown herein and in WO 2013/075035, a superior result may be obtained by introducing one or more motifs of three identical modifications on three consecutive nucleotides into a sense strand or antisense strand of an RNAi agent, particularly at or near the cleavage site. In some embodiments, the sense strand and antisense strand of the RNAi agent may otherwise be completely modified. The introduction of these motifs interrupts the modification pattern, if present, of the sense or antisense strand. The RNAi agent may be optionally conjugated with a lipophilic moiety or ligand, e.g., a C16 moiety or ligand, for instance on the sense strand. The RNAi agent may be optionally modified with a (S)-glycol nucleic acid (GNA) modification, for instance on one or more residues of the antisense strand. The resulting RNAi agents present superior gene silencing activity.

[0235] In some embodiments, the sense strand sequence may be represented by formula (I):

5′ nₚ-Nₐ-(XXX)ᵢ-N_{b}-YYY-N_{b}-(ZZZ)ⱼ-Nₐ-n_{q}3′ (I)

[0236] wherein:

[0237] i and j are each independently 0 or 1;

[0238] p and q are each independently 0-6;

[0239] each Nₐ independently represents an oligonucleotide sequence comprising 0-25 modified nucleotides, each sequence comprising at least two differently modified nucleotides;

[0240] each N_{b} independently represents an oligonucleotide sequence comprising 0-10 modified nucleotides;

[0241] each nₚ and n_{q} independently represent an overhang nucleotide;

[0242] wherein Nb and Y do not have the same modification; and

[0243] XXX, YYY and ZZZ each independently represent one motif of three identical modifications on three consecutive nucleotides. In some embodiments, YYY is all 2′-F modified nucleotides.

[0244] In some embodiments, the Nₐ and/or N_{b} comprise modifications of alternating pattern.

[0245] In some embodiments, the YYY motif occurs at or near the cleavage site of the sense strand. For example, when the RNAi agent has a duplex region of 17-23 nucleotides in length, the YYY motif can occur at or the vicinity of the cleavage site (e.g.: can occur at positions 6, 7, 8; 7, 8, 9; 8, 9, 10; 9, 10, 11; 10, 11,12 or 11, 12, 13) of the sense strand, the count starting from the 1′nucleotide, from the 5′-end; or optionally, the count starting at the 1ₛₜ paired nucleotide within the duplex region, from the 5′-end.

[0246] In some embodiments, i is 1 and j is 0, or i is 0 and j is 1, or both i and j are 1. The sense strand can therefore be represented by the following formulas:

5′ nₚ-Nₐ-YYY-N_{b}-ZZZ-Nₐ-n_{q} 3′ (Ib);

5′ nₚ-Nₐ-XXX-N_{b}-YYY-Nₐ-n_{q} 3′ (Ic); or

5′ nₚ-Nₐ-XXX-N_{b}-YYY-N_{b}-ZZZ-Nₐ-n_{q}3′ (Id).

[0247] When the sense strand is represented by formula (Ib), N_{b} represents an oligonucleotide sequence comprising 0-10, 0-7, 0-5, 0-4, 0-2 or 0 modified nucleotides. Each Nₐ independently can represent an oligonucleotide sequence comprising 2-20, 2-15, or 2-10 modified nucleotides.

[0248] When the sense strand is represented as formula (Ic), N_{b} represents an oligonucleotide sequence comprising 0-10, 0-7, 0-5, 0-4, 0-2 or 0 modified nucleotides. Each Nₐ can independently represent an oligonucleotide sequence comprising 2-20, 2-15, or 2-10 modified nucleotides.

[0249] When the sense strand is represented as formula (Id), each N_{b} independently represents an oligonucleotide sequence comprising 0-10, 0-7, 0-5, 0-4, 0-2 or 0 modified nucleotides. In some embodiments, N_{b} is 0, 1, 2, 3, 4, 5 or 6. Each Nₐ can independently represent an oligonucleotide sequence comprising 2-20, 2-15, or 2-10 modified nucleotides.

[0250] Each of X, Y and Z may be the same or different from each other.

[0251] In other embodiments, i is 0 and j is 0, and the sense strand may be represented by the formula:

5′ nₚ-Nₐ-YYY- Nₐ-n_{q} 3′ (Ia).

[0252] When the sense strand is represented by formula (Ia), each Nₐ independently can represent an oligonucleotide sequence comprising 2-20, 2-15, or 2-10 modified nucleotides.

[0253] In some embodiments, the antisense strand sequence of the RNAi may be represented by formula (Ie):

5′ n_{q}′-Nₐ′-(Z′Z′Z′)ₖ-N_{b}′-Y′Y′Y′-N_{b}′-(X′X′X′)ₗ-N′ₐ-nₚ′ 3′ (Ie)

wherein:

[0254] k and l are each independently 0 or 1;

[0255] p′ and q′ are each independently 0-6;

[0256] each Nₐ′ independently represents an oligonucleotide sequence comprising 0-25 modified nucleotides, each sequence comprising at least two differently modified nucleotides;

[0257] each N_{b}′ independently represents an oligonucleotide sequence comprising 0-10 modified nucleotides;
[0258] each nₚ′ and n_{q}′ independently represent an overhang nucleotide;
[0259] wherein N_{b}′ and Y′ do not have the same modification;
[0260] and

[0261] X′X′X′, Y′Y′Y′, and Z′Z′Z′ each independently represent one of three identical modification on three consecutive nucleotides.

[0262] In some embodiments, the Nₐ′ and/or N_{b}′ comprise modification of alternating pattern.

[0263] The Y′Y′Y′ motif occurs at or near the cleavage site of the antisense strand. For example, when the RNAi agent has a duplex region of 17-23 nucleotides in length, the Y′Y′Y′ motif can occur at positions 9, 10, 11; 10, 11, 12; 11, 12, 13; 12, 13, 14; or 13, 14, 15 of the antisense strand, with the count starting from the 1^{st} nucleotide, from the 5′-end; or optionally, the count starting at the 1^{st} paired nucleotide within the duplex region, from the 5′-end. In some embodiments, the Y′Y′Y′ motif occurs at positions 11, 12, 13.

[0264] In some embodiments, Y′Y′Y′ motif is all 2′-Ome modified nucleotides.

[0265] In on embodiment, k is 1 and 1 is 0, or k is 0 and 1 is 1, or both 5 k and l are 1.

[0266] The antisense strand can therefore be represented by the following formulas:

5′ n_{q}′-Nₐ′-Z′Z′Z′-N_{b}′-Y′Y′Y′-Nₐ′nₚ′ 3′ (Ig);

5′ n_{q}′-Nₐ′-Y′Y′Y′-N_{b}′-X′X′X′-nₚ′ 3′ (Ih); or

5′ n_{q}′-Nₐ′-Z′Z′Z′-N_{b}′-Y′Y′Y′-N_{b}′-X′X′X′-Nₐ′-nₚ′ 3′ (Ii).

[0267] When the antisense strand is represented by formula (Ig), N_{b}′ represents an oligonucleotide sequence comprising 0-10, 0-7, 0-5, 0-4, 0-2 or 0 modified nucleotides. Each Nₐ′ independently represents an oligonucleotide sequence comprising 2-20, 2-15, or 2-10 modified nucleotides.

[0268] When the antisense strand is represented as formula (Ii), each N_{b}′ independently represents an oligonucleotide sequence comprising 0-10, 0-7, 0-5, 0-4, 0-2 or 0 modified nucleotides. Each Nₐ′ independently represents an oligonucleotide sequence comprising 2-20, 2-15, or 2-10 modified nucleotides. In some embodiments, N_{b} is 0, 1, 2, 3, 4, 5 or 6.

[0269] In other embodiments, k is 0 and 1 is 0 and the antisense strand may be represented by the formula:

5′ nₚ′-Nₐ′-Y′Y′Y′-Nₐ′-n_{q}′ 3′ (If).

[0270] When the antisense strand is represented as formula (If), each Na′ independently represents an oligonucleotide sequence comprising 2-20, 2-15, or 2-10 modified nucleotides.

[0271] Each of X′, Y′ and Z′ may be the same or different from each other.

[0272] Each nucleotide of the sense strand and antisense strand may be independently modified with LNA, HNA, CeNA, GNA, 2′-methoxyethyl, 2′-O-methyl, 2′-O-allyl, 2′-C-allyl, 2′-hydroxyl, or 2′-fluoro. For example, each nucleotide of the sense strand and antisense strand is independently modified with 2′-O-methyl or 2′-fluoro. Each X, Y, Z, X′, Y′ and Z′, in particular, may represent a 2′-O-methyl modification or a 2′-fluoro modification.

[0273] In some embodiments, the sense strand of the RNAi agent may contain YYY motif occurring at 9, 10 and 11 positions of the strand when the duplex region is 21 nt, the count starting from the 1 nucleotide from the 5′-end, or optionally, the count starting at the 1^{st} paired nucleotide within the duplex region, from the 5′-end; and Y represents 2′-F modification. The sense strand may additionally contain XXX motif or ZZZ motifs as wing modifications at the opposite end of the duplex region; and XXX and ZZZ each independently represents a 2′-OMe modification or 2′-F modification.

[0274] In some embodiments the antisense strand may Y′Y′Y′ motif occurring at positions 11, 12, 13 of the strand, the count starting from the 1^{st} nucleotide from the 5′-end, or optionally, the count starting at the 1^{st} paired nucleotide within the duplex region, from the 5′-end; and Y′ represents 2′-O-methyl modification. The antisense strand may additionally contain X′X′X′ motif or Z′Z′Z′ motifs as wing modifications at the opposite end of the duplex region; and X′X′X′ and Z′Z′Z′ each independently represents a 2′-OMe modification or 2′-F modification.

[0275] The sense strand represented by any one of the above formulas (Ia), (Ib), (Ic), and (Id) forms a duplex with an antisense strand being represented by any one of formulas (If), (Ig), (Ih), and (Ii), respectively.

[0276] Accordingly, certain RNAi agents for use in the methods of the disclosure may comprise a sense strand and an antisense strand, each strand having 14 to 30 nucleotides, the RNAi duplex represented by formula (Ij):

sense:5′ nₚ-Nₐ-(XXX)i-N_{b}-YYY-N_{b}-(ZZZ)j-Nₐ-n_{q}3′

antisense: 3′ nₚ′-Na′-(X′X′X′)k-N_{b}′-Y′Y′Y′-N_{b}′-(Z′Z′Z′)ᵢ-Nₐ′-n_{q}′ 5′ (Ij)

[0277] wherein,

[0278] i, j, k, and l are each independently 0 or 1;

[0279] p, p′, q, and q′ are each independently 0-6;

[0280] each Nₐ and Nₐ′ independently represents an oligonucleotide sequence comprising 0-25 modified nucleotides, each sequence comprising at least two differently modified nucleotides;

[0281] each N_{b} and N_{b}′ independently represents an oligonucleotide sequence comprising 0-10 modified nucleotides;

[0282] wherein

[0283] each nₚ′, nₚ, n_{q}′, and n_{q}, each of which may or may not be present independently represents an overhang nucleotide; and

[0284] XXX, YYY, ZZZ, X′X′X′, Y′Y′Y′, and Z′Z′Z′ each independently represent one motif of three identical modification on three consecutive nucleotides.

[0285] In some embodiments, i is 0 and j is 0; or i is 1 and j is 0; or i is 0 and j is 1; or both i and j are 0; or both i and j are 1. In some embodiments, k is 0 and l is 0; or k is 1 and 1 is 0; k is 0 and l is 1; or both k and l are 0; or both k and l are 1.

[0286] Exemplary combinations of the sense strand and antisense strand forming a RNAi duplex include the formulas below:

5′ nₚ-Nₐ-YYY-Nₐ-n_{q} 3′

3′ nₚ′-Nₐ′-Y′Y′Y′-Nₐ′n_{q}′ 5′ (Ik)

5′ nₚ-Nₐ-YYY-N_{b}-ZZZ-Nₐ-n_{q} 3′

3′ nₚ-Nₐ′-Y′Y′Y′-N_{b}′-Z′Z′Z′-Na′-nq′ 5′ (Il)

5′ nₚ-Nₐ-XXX-N_{b}′-YYY-Nₐ-n_{q} 3′

3′nₚ-Nₐ′-X′X′X′-N_{b}′-Y′Y′Y′-Na′-n_{q}′ 5′ (Im)

5′ nₚ-Nₐ-XXX-N_{b}-YYY- N_{b}-ZZZ-Nₐ-n_{q} 3′

3′ nₚ-Nₐ′-X′X′X′-N_{b}′-Y′Y′Y′-N_{b}′-Z′Z′Z′-Na′-n_{q}′ 5′ (In)

[0287] When the RNAi agent is represented by formula (Ik), each Nₐ independently represents an oligonucleotide sequence comprising 2-20, 2-15, or 2-10 modified nucleotides.

[0288] When the RNAi agent is represented by formula (Il), each N_{b} independently represents an oligonucleotide sequence comprising 1-10, 1-7, 1-5 or 1-4 modified nucleotides. Each Nₐ independently represents an oligonucleotide sequence comprising 2-20, 2-15, or 2-10 modified nucleotides.

[0289] When the RNAi agent is represented as formula (Im), each N_{b}, N_{b}′ independently represents an oligonucleotide sequence comprising 0-10, 0-7, 0-5, 0-4, 0-2 or 0 modified nucleotides. Each Nₐ independently represents an oligonucleotide sequence comprising 2-20, 2-15, or 2-10 modified nucleotides.

[0290] When the RNAi agent is represented as formula (In), each N_{b}, N_{b}′ independently represents an oligonucleotide sequence comprising 0-10, 0-7, 0-5, 0-4, 0-2 or 0 modified nucleotides. Each Nₐ, Nₐ′ independently represents an oligonucleotide sequence comprising 2-20, 2-15, or 2-10 modified nucleotides. Each of Nₐ, Na′, N_{b} and N_{b}′ independently comprises modifications of alternating pattern.

[0291] Each of X, Y and Z in formulas (Ij), (Ik), (Il), (Im), and (In) may be the same or different from each other.

[0292] When the RNAi agent is represented by formula (Ij), (Ik), (Il), (Im), and (In), at least one of the Y nucleotides may form a base pair with one of the Y′ nucleotides. Alternatively, at least two of the Y nucleotides form base pairs with the corresponding Y′ nucleotides; or all three of the Y nucleotides all form base pairs with the corresponding Y′ nucleotides.

[0293] When the RNAi agent is represented by formula (Il) or (In), at least one of the Z nucleotides may form a base pair with one of the Z′ nucleotides. Alternatively, at least two of the Z nucleotides form base pairs with the corresponding Z′ nucleotides; or all three of the Z nucleotides all form base pairs with the corresponding Z′ nucleotides.

[0294] When the RNAi agent is represented as formula (Im) or (In), at least one of the X nucleotides may form a base pair with one of the X′ nucleotides. Alternatively, at least two of the X nucleotides form base pairs with the corresponding X′ nucleotides; or all three of the X nucleotides all form base pairs with the corresponding X′ nucleotides.

[0295] In some embodiments, the modification on the Y nucleotide is different than the modification on the Y′ nucleotide, the modification on the Z nucleotide is different than the modification on the Z′ nucleotide, and/or the modification on the X nucleotide is different than the modification on the X′ nucleotide.

[0296] In some embodiments, when the RNAi agent is represented by formula (IIId), the Nₐ modifications are 2′-O-methyl or 2′-fluoro modifications. In some embodiments, when the RNAi agent is represented by formula (In), the Nₐ modifications are 2′-O-methyl or 2′-fluoro modifications and nₚ′>0 and at least one nₚ′ is linked to a neighboring nucleotide a via phosphorothioate linkage. In some embodiments, when the RNAi agent is represented by formula (In), the Nₐ modifications are 2′-O-methyl or 2′-fluoro modifications, nₚ′>0 and at least one nₚ′ is linked to a neighboring nucleotide via phosphorothioate linkage, and the sense strand is conjugated to one or more moieties or ligands (e.g., one or more lipophilic moieties, optionally one or more C16 moieties, or one or more GalNAc moieties) attached through a bivalent or trivalent branched linker. In some embodiments, when the RNAi agent is represented by formula (In), the Nₐ modifications are 2′-O-methyl or 2′-fluoro modifications, nₚ′>0 and at least one nₚ′ is linked to a neighboring nucleotide via phosphorothioate linkage, the sense strand comprises at least one phosphorothioate linkage, and the sense strand is conjugated to one or more moieties or ligands (e.g., one or more lipophilic moieties, optionally one or more C16 moieties, or one or more GalNAc moieties) attached through a bivalent or trivalent branched linker.

[0297] In some embodiments, when the RNAi agent is represented by formula (IIIa), the N₃ modifications are 2′-O-methyl or 2′-fluoro modifications, nₚ′>0 and at least one nₚ′ is linked to a neighboring nucleotide via phosphorothioate linkage, the sense strand comprises at least one phosphorothioate linkage, and the sense strand is conjugated to one or more moieties or ligands (e.g., one or more lipophilic moieties, optionally one or more C16 moieties, or one or more GalNAc moieties) attached through a bivalent or trivalent branched linker.

[0298] In some embodiments, the RNAi agent is a multimer containing at least two duplexes represented by formula (Ij), (Ik), (Il), (Im), and (In), wherein the duplexes are connected by a linker. The linker can be cleavable or non-cleavable. Optionally, the multimer further comprises a ligand. Each of the duplexes can target the same gene or two different genes; or each of the duplexes can target same gene at two different target sites.

[0299] In some embodiments, the RNAi agent is a multimer containing three, four, five, six or more duplexes represented by formula (Ij), (Ik), (Il), (Im), and (In), wherein the duplexes are connected by a linker. The linker can be cleavable or non-cleavable. Optionally, the multimer further comprises a ligand. Each of the duplexes can target the same gene or two different genes; or each of the duplexes can target same gene at two different target sites.

[0300] In some embodiments, two RNAi agents represented by formula (Ij), (Ik), (Il), (Im), and (In) are linked to each other at the 5′ end, and one or both of the 3′ ends and are optionally conjugated to a ligand. Each of the agents can target the same gene or two different genes; or each of the agents can target same gene at two different target sites.

[0301] Various publications describe multimeric RNAi agents that can be used in the methods of the disclosure. Such publications include WO2007/091269, WO2010/141511, WO2007/117686, WO2009/014887, and WO2011/031520; and U.S. Pat. No. 7,858,769, the contents of each of which are hereby incorporated herein by reference for the methods provided therein. In certain embodiments, the RNAi agents of the disclosure may include GalNAc ligands.

[0302] As described in more detail below, the RNAi agent that contains conjugations of one or more carbohydrate moieties to a RNAi agent can optimize one or more properties of the RNAi agent. In many cases, the carbohydrate moiety will be attached to a modified subunit of the RNAi agent. For example, the ribose sugar of one or more ribonucleotide subunits of a dsRNA agent can be replaced with another moiety, e.g., a non-carbohydrate (preferably cyclic) carrier to which is attached a carbohydrate ligand. A ribonucleotide subunit in which the ribose sugar of the subunit has been so replaced is referred to herein as a ribose replacement modification subunit (RRMS). A cyclic carrier may be a carbocyclic ring system, i.e., all ring atoms are carbon atoms, or a heterocyclic ring system, i.e., one or more ring atoms may be a heteroatom, e.g., nitrogen, oxygen, sulfur. The cyclic carrier may be a monocyclic ring system, or may contain two or more rings, e.g. fused rings. The cyclic carrier may be a fully saturated ring system, or it may contain one or more double bonds.

[0303] The ligand may be attached to the polynucleotide via a carrier. The carriers include (i) at least one “backbone attachment point,” preferably two “backbone attachment points” and (ii) at least one “tethering attachment point.” A “backbone attachment point” as used herein refers to a functional group, e.g. a hydroxyl group, or generally, a bond available for, and that is suitable for incorporation of the carrier into the backbone, e.g., the phosphate, or modified phosphate, e.g., sulfur containing, backbone, of a ribonucleic acid. A “tethering attachment point” (TAP) in some embodiments refers to a constituent ring atom of the cyclic carrier, e.g., a carbon atom or a heteroatom (distinct from an atom which provides a backbone attachment point), that connects a selected moiety. The moiety can be, e.g., a carbohydrate, e.g. monosaccharide, disaccharide, trisaccharide, tetrasaccharide, oligosaccharide, and polysaccharide. Optionally, the selected moiety is connected by an intervening tether to the cyclic carrier. Thus, the cyclic carrier will often include a functional group, e.g., an amino group, or generally, provide a bond, that is suitable for incorporation or tethering of another chemical entity, e.g., a ligand to the constituent ring.

[0304] The RNAi agents may be conjugated to a ligand via a carrier, wherein the carrier can be cyclic group or acyclic group; preferably, the cyclic group is selected from pyrrolidinyl, pyrazolinyl, pyrazolidinyl, imidazolinyl, imidazolidinyl, piperidinyl, piperazinyl, [1,3]dioxolane, oxazolidinyl, isoxazolidinyl, morpholinyl, thiazolidinyl, isothiazolidinyl, quinoxalinyl, pyridazinonyl, tetrahydrofuryl and and decalin; preferably, the acyclic group is selected from serinol backbone or diethanolamine backbone.

[0305] In certain specific embodiments, the RNAi agent for use in the methods of the disclosure is an agent selected from the group of agents listed in any one of Tables 2A and 2B. These agents may further comprise a ligand. The ligand can be attached to the sense strand, antisense strand or both strands, at the 3′-end, 5′-end, or both ends. For instance, the ligand may be conjugated to the sense strand, in particular, the 3′-end of the sense strand.

### IV. IRNA CONJUGATES

[0306] The iRNA agents disclosed herein can be in the form of conjugates. The conjugate may be attached at any suitable location in the iRNA molecule, e.g., at the 3′ end or the 5′ end of the sense or the antisense strand. The conjugates are optionally attached via a linker.

[0307] In some embodiments, an iRNA agent described herein is chemically linked to one or more ligands, moieties or conjugates, which may confer functionality, e.g., by affecting (e.g., enhancing) the activity, cellular distribution or cellular uptake of the iRNA. Such moieties include but are not limited to lipid moieties such as a cholesterol moiety (Letsinger et al., Proc. Natl. Acid Sci. USA, 1989, 86: 6553-6556), cholic acid (Manoharan et al., Biorg. Med. Chem. Let., 1994, 4:1053-1060), a thioether, e.g., beryl-S-tritylthiol (Manoharan et al., Ann. N.Y. Acad. Sci., 1992, 660:306-309; Manoharan et al., Biorg. Med. Chem. Let., 1993, 3:2765-2770), a thiocholesterol (Oberhauser et al., Nucl. Acids Res., 1992, 20:533-538), an aliphatic chain, e.g., dodecandiol or undecyl residues (Saison-Behmoaras et al., EMBO J, 1991, 10:1111-1118; Kabanov et al., FEBS Lett., 1990, 259:327-330; Svinarchuk et al., Biochimie, 1993, 75:49-54), a phospholipid, e.g., di-hexadecyl-rac-glycerol or triethyl-ammonium 1,2-di-O-hexadecyl-rac-glycero-3-phosphonate (Manoharan et al., Tetrahedron Lett., 1995, 36:3651-3654; Shea et al., Nucl. Acids Res., 1990, 18:3777-3783), a polyamine or a polyethylene glycol chain (Manoharan et al., Nucleosides & Nucleotides, 1995, 14:969-973), or adamantane acetic acid (Manoharan et al., Tetrahedron Lett., 1995, 36:3651-3654), a palmityl moiety (Mishra et al., Biochim. Biophys. Acta, 1995, 1264:229-237), or an octadecylamine or hexylamino-carbonyloxycholesterol moiety (Crooke et al., J. Pharmacol. Exp. Ther., 1996, 277:923-937).

[0308] In some embodiments, a ligand alters the distribution, targeting or lifetime of an iRNA agent into which it is incorporated. In some embodiments, a ligand provides an enhanced affinity for a selected target, e.g., molecule, cell or cell type, compartment, e.g., a cellular or organ compartment, tissue, organ or region of the body, as, e.g., compared to a species absent such a ligand. Typical ligands will not take part in duplex pairing in a duplexed nucleic acid.

[0309] Ligands can include a naturally occurring substance, such as a protein (e.g., human serum albumin (HSA), low-density lipoprotein (LDL), or globulin); carbohydrate (e.g., a dextran, pullulan, chitin, chitosan, inulin, cyclodextrin or hyaluronic acid); or a lipid. The ligand may also be a recombinant or synthetic molecule, such as a synthetic polymer, e.g., a synthetic polyamino acid. Examples of polyamino acids include polyamino acid is a polylysine (PLL), poly L-aspartic acid, poly L-glutamic acid, styrene-maleic acid anhydride copolymer, poly(L-lactide-co-glycolied) copolymer, divinyl ether-maleic anhydride copolymer, N-(2-hydroxypropyl)methacrylamide copolymer (HMPA), polyethylene glycol (PEG), polyvinyl alcohol (PVA), polyurethane, poly(2-ethylacryllic acid), N-isopropylacrylamide polymers, or polyphosphazine. Examples of polyamines include: polyethylenimine, polylysine (PLL), spermine, spermidine, polyamine, pseudopeptide-polyamine, peptidomimetic polyamine, dendrimer polyamine, arginine, amidine, protamine, cationic lipid, cationic porphyrin, quaternary salt of a polyamine, or an a helical peptide.

[0310] Ligands can also include targeting groups, e.g., a cell or tissue targeting agent, e.g., a lectin, glycoprotein, lipid or protein, e.g., an antibody, that binds to a specified cell type such as a kidney cell. A targeting group can be a thyrotropin, melanotropin, lectin, glycoprotein, surfactant protein A, Mucin carbohydrate, multivalent lactose, multivalent galactose, N-acetyl-galactosamine, N-acetyl-glucosamine multivalent mannose, multivalent fucose, glycosylated polyaminoacids, multivalent galactose, transferrin, bisphosphonate, polyglutamate, polyaspartate, a lipid, cholesterol, a steroid, bile acid, folate, vitamin B12, biotin, or an RGD peptide or RGD peptide mimetic.

[0311] Other examples of ligands include dyes, intercalating agents (e.g. acridines), cross-linkers (e.g. psoralene, mitomycin C), porphyrins (TPPC4, texaphyrin, Sapphyrin), polycyclic aromatic hydrocarbons (e.g., phenazine, dihydrophenazine), artificial endonucleases (e.g. EDTA), lipophilic molecules, e.g, cholesterol, cholic acid, adamantane acetic acid, 1-pyrene butyric acid, dihydrotestosterone, 1,3-Bis-O(hexadecyl)glycerol, geranyloxyhexyl group, hexadecylglycerol, borneol, menthol, 1,3-propanediol, heptadecyl group, palmitic acid, myristic acid,O3-((oleoyl)lithocholic acid, O3-(oleoyl)cholenic acid, dimethoxytrityl, or phenoxazine) and peptide conjugates (e.g., antennapedia peptide, Tat peptide), alkylating agents, phosphate, amino, mercapto, PEG (e.g., PEG-40K), MPEG, [MPEG]₂, polyamino, alkyl, substituted alkyl, radiolabeled markers, enzymes, haptens (e.g. biotin), transport/absorption facilitators (e.g., aspirin, vitamin E, folic acid), synthetic ribonucleases (e.g., imidazole, bisimidazole, histamine, imidazole clusters, acridine-imidazole conjugates, Eu3+ complexes of tetraazamacrocycles), dinitrophenyl, HRP, or AP.

[0312] Ligands can be proteins, e.g., glycoproteins, or peptides, e.g., molecules having a specific affinity for a co-ligand, or antibodies e.g., an antibody, that binds to a specified cell type such as an ocular cell. Ligands may also include hormones and hormone receptors. They can also include non-peptidic species, such as lipids, lectins, carbohydrates, vitamins, cofactors, multivalent lactose, multivalent galactose, N-acetyl-galactosamine, N-acetyl-glucosamine multivalent mannose, or multivalent fucose. The ligand can be, for example, a lipopolysaccharide, an activator of p38 MAP kinase, or an activator of NF-κB.

[0313] The ligand can be a substance, e.g., a drug, which can increase the uptake of the iRNA agent into the cell, for example, by disrupting the cell's cytoskeleton, e.g., by disrupting the cell's microtubules, microfilaments, and/or intermediate filaments. The drug can be, for example, taxon, vincristine, vinblastine, cytochalasin, nocodazole, japlakinolide, latrunculin A, phalloidin, swinholide A, indanocine, or myoservin.

[0314] In some embodiments, a ligand attached to an iRNA as described herein acts as a pharmacokinetic modulator (PK modulator). PK modulators include lipophiles, bile acids, steroids, phospholipid analogues, peptides, protein binding agents, PEG, vitamins etc. Exemplary PK modulators include, but are not limited to, cholesterol, fatty acids, cholic acid, lithocholic acid, dialkylglycerides, diacylglyceride, phospholipids, sphingolipids, naproxen, ibuprofen, vitamin E, biotin etc. Oligonucleotides that comprise a number of phosphorothioate linkages are also known to bind to serum protein, thus short oligonucleotides, e.g., oligonucleotides of about 5 bases, 10 bases, 15 bases or 20 bases, comprising multiple of phosphorothioate linkages in the backbone are also amenable to the present disclosure as ligands (e.g. as PK modulating ligands). In addition, aptamers that bind serum components (e.g. serum proteins) are also suitable for use as PK modulating ligands in the embodiments described herein.

[0315] Ligand-conjugated oligonucleotides of the disclosure may be synthesized by the use of an oligonucleotide that bears a pendant reactive functionality, such as that derived from the attachment of a linking molecule onto the oligonucleotide (described below). This reactive oligonucleotide may be reacted directly with commercially available ligands, ligands that are synthesized bearing any of a variety of protecting groups, or ligands that have a linking moiety attached thereto.

[0316] The oligonucleotides used in the conjugates of the present disclosure may be conveniently and routinely made through the well-known technique of solid-phase synthesis. Equipment for such synthesis is sold by several vendors including, for example, Applied Biosystems (Foster City, Calif.). Any other means for such synthesis known in the art may additionally or alternatively be employed. It is also known to use similar techniques to prepare other oligonucleotides, such as the phosphorothioates and alkylated derivatives.

[0317] In the ligand-conjugated oligonucleotides and ligand-molecule bearing sequence-specific linked nucleosides of the present disclosure, the oligonucleotides and oligonucleosides may be assembled on a suitable DNA synthesizer utilizing standard nucleotide or nucleoside precursors, or nucleotide or nucleoside conjugate precursors that already bear the linking moiety, ligand-nucleotide or nucleoside-conjugate precursors that already bear the ligand molecule, or non-nucleoside ligand-bearing building blocks.

[0318] When using nucleotide-conjugate precursors that already bear a linking moiety, the synthesis of the sequence-specific linked nucleosides is typically completed, and the ligand molecule is then reacted with the linking moiety to form the ligand-conjugated oligonucleotide. In some embodiments, the oligonucleotides or linked nucleosides of the present disclosure are synthesized by an automated synthesizer using phosphoramidites derived from ligand-nucleoside conjugates in addition to the standard phosphoramidites and non-standard phosphoramidites that are commercially available and routinely used in oligonucleotide synthesis.

### A. Lipophilic Moieties

[0319] In certain embodiments, the lipophilic moiety is an aliphatic, cyclic such as alicyclic, or polycyclic such as polyalicyclic compound, such as a steroid (e.g., sterol) or a linear or branched aliphatic hydrocarbon. The lipophilic moiety may generally comprise a hydrocarbon chain, which may be cyclic or acyclic. The hydrocarbon chain may comprise various substituents or one or more heteroatoms, such as an oxygen or nitrogen atom. Such lipophilic aliphatic moieties include, without limitation, saturated or unsaturated C₄-C₃₀ hydrocarbon (e.g., C₆-C₁₈ hydrocarbon), saturated or unsaturated fatty acids, waxes (e.g., monohydric alcohol esters of fatty acids and fatty diamides), terpenes (e.g., C₁₀ terpenes, C₁₅ sesquiterpenes, C₂₀ diterpenes, C₃₀ triterpenes, and C₄₀ tetraterpenes), and other polyalicyclic hydrocarbons. For instance, the lipophilic moiety may contain a C₄-C₃₀ hydrocarbon chain (e.g., C₄-C₃₀ alkyl or alkenyl). In some embodiments the lipophilic moiety contains a saturated or unsaturated C₆-C₁₈ hydrocarbon chain (e.g., a linear C₆-C₁₈ alkyl or alkenyl). In some embodiments, the lipophilic moiety contains a saturated or unsaturated C16 hydrocarbon chain (e.g., a linear C16 alkyl or alkenyl).

[0320] The lipophilic moiety may be attached to the RNAi agent by any method known in the art, including via a functional grouping already present in the lipophilic moiety or introduced into the RNAi agent, such as a hydroxy group (e.g., —CO—CH₂—OH). The functional groups already present in the lipophilic moiety or introduced into the RNAi agent include, but are not limited to, hydroxyl, amine, carboxylic acid, sulfonate, phosphate, thiol, azide, and alkyne.

[0321] Conjugation of the RNAi agent and the lipophilic moiety may occur, for example, through formation of an ether or a carboxylic or carbamoyl ester linkage between the hydroxy and an alkyl group R—, an alkanoyl group RCO— or a substituted carbamoyl group RNHCO—. The alkyl group R may be cyclic (e.g., cyclohexyl) or acyclic (e.g., straight-chained or branched; and saturated or unsaturated). Alkyl group R may be a butyl, pentyl, hexyl, heptyl, octyl, nonyl, decyl, undecyl, dodecyl, tridecyl, tetradecyl, pentadecyl, hexadecyl, heptadecyl or octadecyl group, or the like.

[0322] In some embodiments, the lipophilic moiety is conjugated to the double-stranded RNAi agent via a linker a linker containing an ether, thioether, urea, carbonate, amine, amide, maleimide-thioether, disulfide, phosphodiester, sulfonamide linkage, a product of a click reaction (e.g., a triazole from the azide-alkyne cycloaddition), or carbamate.

[0323] In another embodiment, the lipophilic moiety is a steroid, such as sterol. Steroids are polycyclic compounds containing a perhydro-1,2-cyclopentanophenanthrene ring system. Steroids include, without limitation, bile acids (e.g., cholic acid, deoxycholic acid and dehydrocholic acid), cortisone, digoxigenin, testosterone, cholesterol, and cationic steroids, such as cortisone. A “cholesterol derivative” refers to a compound derived from cholesterol, for example by substitution, addition or removal of substituents.

[0324] In another embodiment, the lipophilic moiety is an aromatic moiety. In this context, the term “aromatic” refers broadly to mono- and polyaromatic hydrocarbons. Aromatic groups include, without limitation, C₆-C₁₄ aryl moieties comprising one to three aromatic rings, which may be optionally substituted; “aralkyl” or “arylalkyl” groups comprising an aryl group covalently linked to an alkyl group, either of which may independently be optionally substituted or unsubstituted; and “heteroaryl” groups. As used herein, the term “heteroaryl” refers to groups having 5 to 14 ring atoms, preferably 5, 6, 9, or 10 ring atoms; having 6, 10, or 14n electrons shared in a cyclic array, and having, in addition to carbon atoms, one to about three heteroatoms selected from the group consisting of nitrogen (N), oxygen (O), and sulfur (S).

[0325] As employed herein, a “substituted” alkyl, cycloalkyl, aryl, heteroaryl, or heterocyclic group is one having one to about four, preferably one to about three, more preferably one or two, non-hydrogen substituents. Suitable substituents include, without limitation, halo, hydroxy, nitro, haloalkyl, alkyl, alkaryl, aryl, aralkyl, alkoxy, aryloxy, amino, acylamino, alkylcarbamoyl, arylcarbamoyl, aminoalkyl, alkoxycarbonyl, carboxy, hydroxyalkyl, alkanesulfonyl, arenesulfonyl, alkanesulfonamido, arenesulfonamido, aralkylsulfonamido, alkylcarbonyl, acyloxy, cyano, and ureido groups.

[0326] In some embodiments, the lipophilic moiety is an aralkyl group, e.g., a 2-arylpropanoyl moiety. The structural features of the aralkyl group are selected so that the lipophilic moiety will bind to at least one protein in vivo. In certain embodiments, the structural features of the aralkyl group are selected so that the lipophilic moiety binds to serum, vascular, or cellular proteins. In certain embodiments, the structural features of the aralkyl group promote binding to albumin, an immunoglobulin, a lipoprotein, α-2-macroglubulin, or α-1-glycoprotein.

[0327] In certain embodiments, the ligand is naproxen or a structural derivative of naproxen. Procedures for the synthesis of naproxen can be found in U.S. Pat. Nos. 3,904,682 and 4,009,197, which are hereby incorporated by reference in their entirety. Naproxen has the chemical name (S)-6-Methoxy-α-methyl-2-naphthaleneacetic acid and the structure is

[chemical structure]

[0328] In certain embodiments, the ligand is ibuprofen or a structural derivative of ibuprofen. Procedures for the synthesis of ibuprofen can be found in U.S. Pat. No. 3,228,831, which is incorporated herein by reference for the methods provided therein. The structure of ibuprofen is

[chemical structure]

[0329] Additional exemplary aralkyl groups are illustrated in U.S. Pat. No. 7,626,014, which is incorporated herein by reference for the methods provided therein.

[0330] In another embodiment, suitable lipophilic moieties include lipid, cholesterol, retinoic acid, cholic acid, adamantane acetic acid, 1-pyrene butyric acid, dihydrotestosterone, 1,3-bis-O(hexadecyl)glycerol, geranyloxyhexyanol, hexadecylglycerol, borneol, menthol, 1,3-propanediol, heptadecyl group, palmitic acid, myristic acid, O3-(oleoyl)lithocholic acid, O3-((oleoyl)cholenic acid, ibuprofen, naproxen, dimethoxytrityl, or phenoxazine.

[0331] In certain embodiments, more than one lipophilic moiety can be incorporated into the double-strand RNAi agent, particularly when the lipophilic moiety has a low lipophilicity or hydrophobicity. In some embodiments, two or more lipophilic moieties are incorporated into the same strand of the double-strand RNAi agent. In some embodiments, each strand of the double-strand RNAi agent has one or more lipophilic moieties incorporated. In some embodiments, two or more lipophilic moieties are incorporated into the same position (i.e., the same nucleobase, same sugar moiety, or same internucleosidic linkage) of the double-strand RNAi agent. This can be achieved by, e.g., conjugating the two or more lipophilic moieties via a carrier, or conjugating the two or more lipophilic moieties via a branched linker, or conjugating the two or more lipophilic moieties via one or more linkers, with one or more linkers linking the lipophilic moieties consecutively.

[0332] The lipophilic moiety may be conjugated to the RNAi agent via a direct attachment to the ribosugar of the RNAi agent. Alternatively, the lipophilic moiety may be conjugated to the double-strand RNAi agent via a linker or a carrier.

[0333] In certain embodiments, the lipophilic moiety may be conjugated to the RNAi agent via one or more linkers (tethers).

[0334] In some embodiments, the lipophilic moiety is conjugated to the double-stranded RNAi agent via a linker containing an ether, thioether, urea, carbonate, amine, amide, maleimide-thioether, disulfide, phosphodiester, sulfonamide linkage, a product of a click reaction (e.g., a triazole from the azide-alkyne cycloaddition), or carbamate.

### B. Lipid Conjugates

[0335] In some embodiments, the ligand is a lipid or lipid-based molecule. Such a lipid or lipid-based molecule can typically bind a serum protein, such as human serum albumin (HSA). An HSA binding ligand allows for vascular distribution of the conjugate to a target tissue. For example, the target tissue can be the eye. Other molecules that can bind HSA can also be used as ligands. For example, neproxin or aspirin can be used. A lipid or lipid-based ligand can (a) increase resistance to degradation of the conjugate, (b) increase targeting or transport into a target cell or cell membrane, and/or (c) can be used to adjust binding to a serum protein, e.g., HSA.

[0336] A lipid-based ligand can be used to modulate, e.g., control (e.g., inhibit) the binding of the conjugate to a target tissue. For example, a lipid or lipid-based ligand that binds to HSA more strongly will be less likely to be targeted to the kidney and therefore less likely to be cleared from the body. A lipid or lipid-based ligand that binds to HSA less strongly can be used to target the conjugate to the kidney.

[0337] In some embodiments, the lipid-based ligand binds HSA. For example, the ligand can bind HSA with a sufficient affinity such that distribution of the conjugate to a non-kidney tissue is enhanced. However, the affinity is typically not so strong that the HSA-ligand binding cannot be reversed.

[0338] In some embodiments, the lipid-based ligand binds HSA weakly or not at all, such that distribution of the conjugate to the kidney is enhanced. Other moieties that target to kidney cells can also be used in place of or in addition to the lipid-based ligand.

[0339] In another aspect, the ligand is a moiety, e.g., a vitamin, which is taken up by a target cell, e.g., a proliferating cell. These are particularly useful for treating disorders characterized by unwanted cell proliferation, e.g., of the malignant or non-malignant type, e.g., cancer cells.

[0340] Exemplary vitamins include vitamin A, E, and K. Other exemplary vitamins include are B vitamin, e.g., folic acid, B12, riboflavin, biotin, pyridoxal or other vitamins or nutrients taken up by cancer cells. Also included are HSA and low-density lipoprotein (LDL).

### C. Cell Permeation Agents

[0341] In another aspect, the ligand is a cell-permeation agent, such as a helical cell-permeation agent. In some embodiments, the agent is amphipathic. An exemplary agent is a peptide such as tat or antennopedia. If the agent is a peptide, it can be modified, including a peptidylmimetic, invertomers, non-peptide or pseudo-peptide linkages, and use of D-amino acids. The helical agent is typically an α-helical agent, and can have a lipophilic and a lipophobic phase.

[0342] The ligand can be a peptide or peptidomimetic. A peptidomimetic (also referred to herein as an oligopeptidomimetic) is a molecule capable of folding into a defined three-dimensional structure similar to a natural peptide. The attachment of peptide and peptidomimetics to iRNA agents can affect pharmacokinetic distribution of the iRNA, such as by enhancing cellular recognition and absorption. The peptide or peptidomimetic moiety can be about 5-50 amino acids long, e.g., about 5, 10, 15, 20, 25, 30, 35, 40, 45, or 50 amino acids long.

[0343] A peptide or peptidomimetic can be, for example, a cell permeation peptide, cationic peptide, amphipathic peptide, or hydrophobic peptide (e.g., consisting primarily of Tyr, Trp or Phe). The peptide moiety can be a dendrimer peptide, constrained peptide or crosslinked peptide. In another alternative, the peptide moiety can include a hydrophobic membrane translocation sequence (MTS). An exemplary hydrophobic MTS-containing peptide is RFGF having the amino acid sequence AAVALLPAVLLALLAP (SEQ ID NO: 3). An RFGF analogue (e.g., amino acid sequence AALLPVLLAAP (SEQ ID NO: 4)) containing a hydrophobic MTS can also be a targeting moiety. The peptide moiety can be a “delivery” peptide, which can carry large polar molecules including peptides, oligonucleotides, and protein across cell membranes. For example, sequences from the HIV Tat protein (GRKKRRQRRRPPQ (SEQ ID NO: 5)) and the Drosophila Antennapedia protein (RQIKIWFQNRRMKWKK (SEQ ID NO: 6)) have been found to be capable of functioning as delivery peptides. A peptide or peptidomimetic can be encoded by a random sequence of DNA, such as a peptide identified from a phage-display library, or one-bead-one-compound (OBOC) combinatorial library (Lam et al., Nature, 354:82-84, 1991). Typically, the peptide or peptidomimetic tethered to a dsRNA agent via an incorporated monomer unit is a cell targeting peptide such as an arginine-glycine-aspartic acid (RGD)-peptide, or RGD mimic. A peptide moiety can range in length from about 5 amino acids to about 40 amino acids. The peptide moieties can have a structural modification, such as to increase stability or direct conformational properties. Any of the structural modifications described below can be utilized.

[0344] An RGD peptide for use in the compositions and methods of the disclosure may be linear or cyclic, and may be modified, e.g., glycosylated or methylated, to facilitate targeting to a specific tissue(s). RGD-containing peptides and peptidomimetics may include D-amino acids, as well as synthetic RGD mimics. In addition to RGD, one can use other moieties that target the integrin ligand. In some embodiments, conjugates of this ligand target PECAM-1 or VEGF.

[0345] An RGD peptide moiety can be used to target a particular cell type, e.g., a tumor cell, such as an endothelial tumor cell or a breast cancer tumor cell (Zitzmann et al., Cancer Res., 62:5139-43, 2002). An RGD peptide can facilitate targeting of an dsRNA agent to tumors of a variety of other tissues, including the lung, kidney, spleen, or liver (Aoki et al., Cancer Gene Therapy 8:783-787, 2001). Typically, the RGD peptide will facilitate targeting of an iRNA agent to the kidney. The RGD peptide can be linear or cyclic, and can be modified, e.g., glycosylated or methylated to facilitate targeting to specific tissues. For example, a glycosylated RGD peptide can deliver a iRNA agent to a tumor cell expressing α_{V}ß₃ (Haubner et al., Jour. Nucl. Med., 42:326-336, 2001).

[0346] A “cell permeation peptide” is capable of permeating a cell, e.g., a microbial cell, such as a bacterial or fungal cell, or a mammalian cell, such as a human cell. A microbial cell-permeating peptide can be, for example, an α-helical linear peptide (e.g., LL-37 or Ceropin P1), a disulfide bond-containing peptide (e.g., α-defensin, β-defensin or bactenecin), or a peptide containing only one or two dominating amino acids (e.g., PR-39 or indolicidin). A cell permeation peptide can also include a nuclear localization signal (NLS). For example, a cell permeation peptide can be a bipartite amphipathic peptide, such as MPG, which is derived from the fusion peptide domain of HIV-1 gp41 and the NLS of SV40 large T antigen (Simeoni et al., Nucl. Acids Res. 31:2717-2724, 2003).

### D. Carbohydrate Conjugates and Ligands

[0347] In some embodiments of the compositions and methods of the disclosure, an iRNA oligonucleotide further comprises a carbohydrate. The carbohydrate conjugated iRNA are advantageous for the in vivo delivery of nucleic acids, as well as compositions suitable for in vivo therapeutic use, as described herein. As used herein, “carbohydrate” refers to a compound which is either a carbohydrate per se made up of one or more monosaccharide units having at least 6 carbon atoms (which can be linear, branched or cyclic) with an oxygen, nitrogen or sulfur atom bonded to each carbon atom; or a compound having as a part thereof a carbohydrate moiety made up of one or more monosaccharide units each having at least six carbon atoms (which can be linear, branched or cyclic), with an oxygen, nitrogen or sulfur atom bonded to each carbon atom. Representative carbohydrates include the sugars (mono-, di-, tri- and oligosaccharides containing from about 4, 5, 6, 7, 8, or 9 monosaccharide units), and polysaccharides such as starches, glycogen, cellulose and polysaccharide gums. Specific monosaccharides include C5 and above (e.g., C5, C6, C7, or C8) sugars; di- and trisaccharides include sugars having two or three monosaccharide units (e.g., C5, C6, C7, or C8).

[0348] In certain embodiments, the compositions and methods of the disclosure include a C16 ligand. In exemplary embodiments, the C16 ligand of the disclosure has the following structure (exemplified here below for a uracil base, yet attachment of the C16 ligand is contemplated for a nucleotide presenting any base (C, G, A, etc.) or possessing any other modification as presented herein, provided that 2′ ribo attachment is preserved) and is attached at the 2′ position of the ribo within a residue that is so modified:

[chemical structure]

[0349] As shown above, a C16 ligand-modified residue presents a straight chain alkyl at the 2′-ribo position of an exemplary residue (here, a Uracil) that is so modified.

[0350] In some embodiments, a carbohydrate conjugate of a RNAi agent of the instant disclosure further comprises one or more additional ligands as described above, such as, but not limited to, a PK modulator or a cell permeation peptide.

[0351] Additional carbohydrate conjugates (and linkers) suitable for use in the present disclosure include those described in WO 2014/179620 and WO 2014/179627, the entire contents of each of which are incorporated herein by reference.

[0352] In certain embodiments, the compositions and methods of the disclosure include a vinyl phosphonate (VP) modification of an RNAi agent as described herein. In exemplary embodiments, a vinyl phosphonate of the disclosure has the following structure:

[chemical structure]

[0353] A vinyl phosphonate of the instant disclosure may be attached to either the antisense or the sense strand of a dsRNA of the disclosure. In certain preferred embodiments, a vinyl phosphonate of the instant disclosure is attached to the antisense strand of a dsRNA, optionally at the 5′ end of the antisense strand of the dsRNA. The dsRNA agent can comprise a phosphorus-containing group at the 5′-end of the sense strand or antisense strand. The 5′-end phosphorus-containing group can be 5′-end phosphate (5′-P), 5′-end phosphorothioate (5′-PS), 5′-end phosphorodithioate (5′-PS2), 5′-end vinylphosphonate (5′-VP), 5′-end methylphosphonate (MePhos), or 5′-deoxy-5′-C-malonyl. When the 5′-end phosphorus-containing group is 5′-end vinylphosphonate (5′-VP), the 5′-VP can be either 5′-E-VP isomer (i.e., trans-vinylphosphonate,

[chemical structure]

5′-Z-VP isomer (i.e., cis-vinylphosphonate,

[chemical structure]

or mixtures thereof.

[0354] Vinyl phosphate modifications are also contemplated for the compositions and methods of the instant disclosure. An exemplary vinyl phosphate structure is:

[chemical structure]

[0355] In some embodiments, a carbohydrate conjugate comprises a monosaccharide. In some embodiments, the monosaccharide is an N-acetylgalactosamine (GalNAc). GalNAc conjugates, which comprise one or more N-acetylgalactosamine (GalNAc) derivatives, are described, for example, in U.S. Pat. No. 8,106,022, the entire content of which is hereby incorporated herein by reference. In some embodiments, the GalNAc conjugate serves as a ligand that targets the iRNA to particular cells. In some embodiments, the GalNAc conjugate targets the iRNA to liver cells, e.g., by serving as a ligand for the asialoglycoprotein receptor of liver cells (e.g., hepatocytes).

[0356] In some embodiments, the carbohydrate conjugate comprises one or more GalNAc derivatives. The GalNAc derivatives may be attached via a linker, e.g., a bivalent or trivalent branched linker. In some embodiments the GalNAc conjugate is conjugated to the 3′ end of the sense strand. In some embodiments, the GalNAc conjugate is conjugated to the iRNA agent (e.g., to the 3′ end of the sense strand) via a linker, e.g., a linker as described herein.

[0357] In some embodiments, the GalNAc conjugate is

[chemical structure]

[0358] In some embodiments, the RNAi agent is attached to the carbohydrate conjugate via a linker as shown in the following schematic, wherein X is O or S:

[chemical structure]

[0359] In some embodiments, the RNAi agent is conjugated to L96 as defined in Table 1 and shown below:

[chemical structure]

[0360] In some embodiments, a carbohydrate conjugate for use in the compositions and methods of the disclosure is selected from the group consisting of.

[chemical structure]

[chemical structure]

[chemical structure]

[chemical structure]

[chemical structure]

[0361] Another representative carbohydrate conjugate for use in the embodiments described herein includes but is not limited to

[chemical structure]

[0362] (Formula XXIII), when one of X or Y is an oligonucleotide, the other is a hydrogen.

[0363] In some embodiments, the carbohydrate conjugate further comprises one or more additional ligands as described above, such as, but not limited to, a PK modulator and/or a cell permeation peptide.

[0364] In some embodiments, an iRNA of the disclosure is conjugated to a carbohydrate through a linker. Non-limiting examples of iRNA carbohydrate conjugates with linkers of the compositions and methods of the disclosure include, but are not limited to,

[chemical structure]

[chemical structure]

[chemical structure]

when one of X or Y is an oligonucleotide, the other is a hydrogen.

### E. Thermally Destabilizing Modifications

[0365] In certain embodiments, a dsRNA molecule can be optimized for RNA interference by incorporating thermally destabilizing modifications in the seed region of the antisense strand (i.e., at positions 2-9 of the 5′-end of the antisense strand) to reduce or inhibit off-target gene silencing. It has been discovered that dsRNAs with an antisense strand comprising at least one thermally destabilizing modification of the duplex within the first 9 nucleotide positions, counting from the 5′ end, of the antisense strand have reduced off-target gene silencing activity. Accordingly, in some embodiments, the antisense strand comprises at least one (e.g., one, two, three, four, five, or more) thermally destabilizing modification of the duplex within the first 9 nucleotide positions of the 5′ region of the antisense strand. In some embodiments, one or more thermally destabilizing modification(s) of the duplex is/are located in positions 2-9, or preferably positions 4-8, from the 5′-end of the antisense strand. In some further embodiments, the thermally destabilizing modification(s) of the duplex is/are located at position 6, 7, or 8 from the 5′-end of the antisense strand. In still some further embodiments, the thermally destabilizing modification of the duplex is located at position 7 from the 5′-end of the antisense strand. The term “thermally destabilizing modification(s)” includes modification(s) that would result with a dsRNA with a lower overall melting temperature (Tm) (preferably a Tm with one, two, three, or four degrees lower than the Tm of the dsRNA without having such modification(s). In some embodiments, the thermally destabilizing modification of the duplex is located at position 2, 3, 4, 5, or 9 from the 5′-end of the anti sense strand.

[0366] The thermally destabilizing modifications can include, but are not limited to, abasic modification; mismatch with the opposing nucleotide in the opposing strand; and sugar modification such as 2′-deoxy modification or acyclic nucleotide, e.g., unlocked nucleic acids (UNA) or glycol nucleic acid (GNA).

[0367] Exemplified abasic modifications include, but are not limited to, the following:

[chemical structure]

### Wherein R═H, Me, Et or OMe; R′═H, Me, Et or OMe; R″═H, Me, Et or OMe

[chemical structure]

wherein B is a modified or unmodified nucleobase.

[0369] Exemplified sugar modifications include, but are not limited to the following:

[chemical structure]

wherein B is a modified or unmodified nucleobase.

[0370] In some embodiments the thermally destabilizing modification of the duplex is selected from the group consisting of:

[chemical structure]

wherein B is a modified or unmodified nucleobase and the asterisk on each structure represents either, S or racemic.

[0371] The term “acyclic nucleotide” refers to any nucleotide having an acyclic ribose sugar, for example, where any of bonds between the ribose carbons (e.g., C1′-C2′, C2′-C3′, C3′-C4′, C4′-O4′, or C1′-O4′) is absent or at least one of ribose carbons or oxygen (e.g., C1′, C2′, C3′, C4′, or O4′) are independently or in combination absent from the nucleotide. In some embodiments, acyclic nucleotide is

[chemical structure]

wherein B is a modified or unmodified nucleobase, R¹ and R² independently are H, halogen, OR₃, or alkyl; and R₃ is H, alkyl, cycloalkyl, aryl, aralkyl, heteroaryl or sugar). The term “UNA” refers to unlocked acyclic nucleic acid, wherein any of the bonds of the sugar has been removed, forming an unlocked “sugar” residue. In one example, UNA also encompasses monomers with bonds between C1′-C4′ being removed (i.e. the covalent carbon-oxygen-carbon bond between the C1′ and C4′ carbons). In another example, the C2′-C3′ bond (i.e. the covalent carbon-carbon bond between the C2′ and C3′ carbons) of the sugar is removed (see Mikhailov et. al., Tetrahedron Letters, 26 (17): 2059 (1985); and Fluiter et al., Mol. Biosyst., 10: 1039 (2009), which are hereby incorporated by reference in their entirety). The acyclic derivative provides greater backbone flexibility without affecting the Watson-Crick pairings. The acyclic nucleotide can be linked via 2′-5′ or 3′-5′ linkage.

[0372] The term ‘GNA’ refers to glycol nucleic acid which is a polymer similar to DNA or RNA but differing in the composition of its “backbone” in that is composed of repeating glycerol units linked by phosphodiester bonds:

[chemical structure]

[0373] The thermally destabilizing modification of the duplex can be mismatches (i.e., noncomplementary base pairs) between the thermally destabilizing nucleotide and the opposing nucleotide in the opposite strand within the dsRNA duplex. Exemplary mismatch base pairs include G:G, G:A, G:U, G:T, A:A, A:C, C:C, C:U, C:T, U:U, T:T, U:T, or a combination thereof. Other mismatch base pairings known in the art are also amenable to the present invention. A mismatch can occur between nucleotides that are either naturally occurring nucleotides or modified nucleotides, i.e., the mismatch base pairing can occur between the nucleobases from respective nucleotides independent of the modifications on the ribose sugars of the nucleotides. In certain embodiments, the dsRNA molecule contains at least one nucleobase in the mismatch pairing that is a 2′-deoxy nucleobase; e.g., the 2′-deoxy nucleobase is in the sense strand.

[0374] In some embodiments, the thermally destabilizing modification of the duplex in the seed region of the antisense strand includes nucleotides with impaired W—C H-bonding to complementary base on the target mRNA, such as:

[chemical structure]

[0375] More examples of abasic nucleotide, acyclic nucleotide modifications (including UNA and GNA), and mismatch modifications have been described in detail in WO 2011/133876, which is herein incorporated by reference in its entirety.

[0376] The thermally destabilizing modifications may also include universal base with reduced or abolished capability to form hydrogen bonds with the opposing bases, and phosphate modifications.

[0377] In some embodiments, the thermally destabilizing modification of the duplex includes nucleotides with non-canonical bases such as, but not limited to, nucleobase modifications with impaired or completely abolished capability to form hydrogen bonds with bases in the opposite strand. These nucleobase modifications have been evaluated for destabilization of the central region of the dsRNA duplex as described in WO 2010/0011895, which is herein incorporated by reference in its entirety. Exemplary nucleobase modifications are:

[chemical structure]

[0378] In some embodiments, the thermally destabilizing modification of the duplex in the seed region of the antisense strand includes one or more α-nucleotide complementary to the base on the tar et mRNA, such as:

[chemical structure]

wherein R is H, OH, OCH₃, F, NH₂, NHMe, NMe₂ or O-alkyl.

[0379] Exemplary phosphate modifications known to decrease the thermal stability of dsRNA duplexes compared to natural phosphodiester linkages are:

[chemical structure]

[0380] The alkyl for the R group can be a C₁-C₆alkyl. Specific alkyls for the R group include, but are not limited to methyl, ethyl, propyl, isopropyl, butyl, pentyl and hexyl.

[0381] As the skilled artisan will recognize, in view of the functional role of nucleobases is defining specificity of a RNAi agent of the disclosure, while nucleobase modifications can be performed in the various manners as described herein, e.g., to introduce destabilizing modifications into a RNAi agent of the disclosure, e.g., for purpose of enhancing on-target effect relative to off-target effect, the range of modifications available and, in general, present upon RNAi agents of the disclosure tends to be much greater for non-nucleobase modifications, e.g., modifications to sugar groups or phosphate backbones of polyribonucleotides. Such modifications are described in greater detail in other sections of the instant disclosure and are expressly contemplated for RNAi agents of the disclosure, either possessing native nucleobases or modified nucleobases as described above or elsewhere herein.

[0382] In addition to the antisense strand comprising a thermally destabilizing modification, the dsRNA can also comprise one or more stabilizing modifications. For example, the dsRNA can comprise at least two (e.g., two, three, four, five, six, seven, eight, nine, ten, or more) stabilizing modifications. Without limitations, the stabilizing modifications all can be present in one strand. In some embodiments, both the sense and the antisense strands comprise at least two stabilizing modifications. The stabilizing modification can occur on any nucleotide of the sense strand or antisense strand. For instance, the stabilizing modification can occur on every nucleotide on the sense strand or antisense strand; each stabilizing modification can occur in an alternating pattern on the sense strand or antisense strand: or the sense strand or antisense strand comprises both stabilizing modification in an alternating pattern. The alternating pattern of the stabilizing modifications on the sense strand may be the same or different from the antisense strand, and the alternating pattern of the stabilizing modifications on the sense strand can have a shift relative to the alternating pattern of the stabilizing modifications on the antisense strand.

[0383] In some embodiments, the antisense strand comprises at least two (e.g., two, three, four, five, six, seven, eight, nine, ten, or more) stabilizing modifications. Without limitations, a stabilizing modification in the antisense strand can be present at any positions.

[0384] In some embodiments, the antisense strand comprises stabilizing modifications at positions 2, 6, 8, 9, 14, and 16 from the 5′-end. In some other embodiments, the antisense strand comprises stabilizing modifications at positions 2, 6, 14, and 16 from the 5′-end. In still some other embodiments, the antisense strand comprises stabilizing modifications at positions 2, 14, and 16 from the 5′-end.

[0385] In some embodiments, the antisense strand comprises at least one stabilizing modification adjacent to the destabilizing modification. For example, the stabilizing modification can be the nucleotide at the 5′-end or the 3′-end of the destabilizing modification, i.e., at position −1 or +1 from the position of the destabilizing modification. In some embodiments, the antisense strand comprises a stabilizing modification at each of the 5′-end and the 3′-end of the destabilizing modification, i.e., positions −1 and +1 from the position of the destabilizing modification.

[0386] In some embodiments, the antisense strand comprises at least two stabilizing modifications at the 3′-end of the destabilizing modification, i.e., at positions +1 and +2 from the position of the destabilizing modification.

[0387] In some embodiments, the sense strand comprises at least two (e.g., two, three, four, five, six, seven, eight, nine, ten or more) stabilizing modifications. Without limitations, a stabilizing modification in the sense strand can be present at any positions. In some embodiments, the sense strand comprises stabilizing modifications at positions 7, 10, and 11 from the 5′-end. In some other embodiments, the sense strand comprises stabilizing modifications at positions 7, 9, 10, and 11 from the 5′-end. In some embodiments, the sense strand comprises stabilizing modifications at positions opposite or complimentary to positions 11, 12, and 15 of the antisense strand, counting from the 5′-end of the antisense strand. In some other embodiments, the sense strand comprises stabilizing modifications at positions opposite or complimentary to positions 11, 12, 13, and 15 of the antisense strand, counting from the 5′-end of the antisense strand. In some embodiments, the sense strand comprises a block of two, three, or four stabilizing modifications.

[0388] In some embodiments, the sense strand does not comprise a stabilizing modification in position opposite or complimentary to the thermally destabilizing modification of the duplex in the antisense strand.

[0389] Exemplary thermally stabilizing modifications include, but are not limited to, 2′-fluoro modifications. Other thermally stabilizing modifications include, but are not limited to, LNA.

[0390] In some embodiments, the dsRNA of the disclosure comprises at least four (e.g., four, five, six, seven, eight, nine, ten, or more) 2′-fluoro nucleotides. Without limitations, the 2′-fluoro nucleotides all can be present in one strand. In some embodiments, both the sense and the antisense strands comprise at least two 2′-fluoro nucleotides. The 2′-fluoro modification can occur on any nucleotide of the sense strand or antisense strand. For instance, the 2′-fluoro modification can occur on every nucleotide on the sense strand or antisense strand; each 2′-fluoro modification can occur in an alternating pattern on the sense strand or antisense strand; or the sense strand or antisense strand comprises both 2′-fluoro modifications in an alternating pattern. The alternating pattern of the 2′-fluoro modifications on the sense strand may be the same or different from the antisense strand, and the alternating pattern of the 2′-fluoro modifications on the sense strand can have a shift relative to the alternating pattern of the 2′-fluoro modifications on the antisense strand.

[0391] In some embodiments, the antisense strand comprises at least two (e.g., two, three, four, five, six, seven, eight, nine, ten, or more) 2′-fluoro nucleotides. Without limitations, a 2′-fluoro modification in the antisense strand can be present at any positions. In some embodiments, the antisense comprises 2′-fluoro nucleotides at positions 2, 6, 8, 9, 14, and 16 from the 5′-end. In some other embodiments, the antisense comprises 2′-fluoro nucleotides at positions 2, 6, 14, and 16 from the 5′-end. In still some other embodiments, the antisense comprises 2′-fluoro nucleotides at positions 2, 14, and 16 from the 5′-end.

[0392] In some embodiments, the antisense strand comprises at least one 2′-fluoro nucleotide adjacent to the destabilizing modification. For example, the 2′-fluoro nucleotide can be the nucleotide at the 5′-end or the 3′-end of the destabilizing modification, i.e., at position −1 or +1 from the position of the destabilizing modification. In some embodiments, the antisense strand comprises a 2′-fluoro nucleotide at each of the 5′-end and the 3′-end of the destabilizing modification, i.e., positions −1 and +1 from the position of the destabilizing modification.

[0393] In some embodiments, the antisense strand comprises at least two 2′-fluoro nucleotides at the 3′-end of the destabilizing modification, i.e., at positions +1 and +2 from the position of the destabilizing modification.

[0394] In some embodiments, the sense strand comprises at least two (e.g., two, three, four, five, six, seven, eight, nine, ten, or more) 2′-fluoro nucleotides. Without limitations, a 2′-fluoro modification in the sense strand can be present at any positions. In some embodiments, the antisense comprises 2′-fluoro nucleotides at positions 7, 10, and 11 from the 5′-end. In some other embodiments, the sense strand comprises 2′-fluoro nucleotides at positions 7, 9, 10, and 11 from the 5′-end. In some embodiments, the sense strand comprises 2′-fluoro nucleotides at positions opposite or complimentary to positions 11, 12, and 15 of the antisense strand, counting from the 5′-end of the antisense strand. In some other embodiments, the sense strand comprises 2′-fluoro nucleotides at positions opposite or complimentary to positions 11, 12, 13, and 15 of the antisense strand, counting from the 5′-end of the antisense strand. In some embodiments, the sense strand comprises a block of two, three, or four 2′-fluoro nucleotides.

[0395] In some embodiments, the sense strand does not comprise a 2′-fluoro nucleotide in position opposite or complimentary to the thermally destabilizing modification of the duplex in the antisense strand.

[0396] In some embodiments, the dsRNA molecule of the disclosure comprises a 21 nucleotides (nt) sense strand and a 23 nucleotides (nt) antisense, wherein the antisense strand contains at least one thermally destabilizing nucleotide, where the at least one thermally destabilizing nucleotide occurs in the seed region of the antisense strand (i.e., at position 2-9 of the 5′-end of the antisense strand), wherein one end of the dsRNA is blunt, while the other end is comprises a 2 nt overhang, and wherein the dsRNA optionally further has at least one (e.g., one, two, three, four, five, six, or all seven) of the following characteristics: (i) the antisense comprises 2, 3, 4, 5, or 6 2′-fluoro modifications; (ii) the antisense comprises 1, 2, 3, 4, or 5 phosphorothioate internucleotide linkages; (iii) the sense strand is conjugated with a ligand; (iv) the sense strand comprises 2, 3, 4, or 5 2′-fluoro modifications; (v) the sense strand comprises 1, 2, 3, 4, or 5 phosphorothioate internucleotide linkages; (vi) the dsRNA comprises at least four 2′-fluoro modifications; and (vii) the dsRNA comprises a blunt end at 5′-end of the antisense strand. Preferably, the 2 nt overhang is at the 3′-end of the antisense.

[0397] In some embodiments, every nucleotide in the sense strand and antisense strand of the dsRNA molecule may be modified. Each nucleotide may be modified with the same or different modification which can include one or more alteration of one or both of the non-linking phosphate oxygens or of one or more of the linking phosphate oxygens; alteration of a constituent of the ribose sugar, e.g., of the 2′ hydroxyl on the ribose sugar; wholesale replacement of the phosphate moiety with “dephospho” linkers; modification or replacement of a naturally occurring base; and replacement or modification of the ribose-phosphate backbone.

[0398] As nucleic acids are polymers of subunits, many of the modifications occur at a position which is repeated within a nucleic acid, e.g., a modification of a base, or a phosphate moiety, or a non-linking O of a phosphate moiety. In some cases, the modification will occur at all of the subject positions in the nucleic acid but in many cases it will not. By way of example, a modification may only occur at a 3′ or 5′ terminal position, may only occur in a terminal region, e.g., at a position on a terminal nucleotide or in the last 2, 3, 4, 5, or 10 nucleotides of a strand. A modification may occur in a double strand region, a single strand region, or in both. A modification may occur only in the double strand region of an RNA or may only occur in a single strand region of an RNA. E.g., a phosphorothioate modification at a non-linking O position may only occur at one or both termini, may only occur in a terminal region, e.g., at a position on a terminal nucleotide or in the last 2, 3, 4, 5, or 10 nucleotides of a strand, or may occur in double strand and single strand regions, particularly at termini. The 5′ end or ends can be phosphorylated.

[0399] It may be possible, e.g., to enhance stability, to include particular bases in overhangs, or to include modified nucleotides or nucleotide surrogates, in single strand overhangs, e.g., in a 5′ or 3′ overhang, or in both. E.g., it can be desirable to include purine nucleotides in overhangs. In some embodiments all or some of the bases in a 3′ or 5′ overhang may be modified, e.g., with a modification described herein. Modifications can include, e.g., the use of modifications at the 2′ position of the ribose sugar with modifications that are known in the art, e.g., the use of deoxyribonucleotides, 2′-deoxy-2′-fluoro (2′-F) or 2′-O-methyl modified instead of the ribosugar of the nucleobase, and modifications in the phosphate group, e.g., phosphorothioate modifications. Overhangs need not be homologous with the target sequence.

[0400] In some embodiments, each residue of the sense strand and antisense strand is independently modified with LNA, HNA, CeNA, 2′-methoxyethyl, 2′-O-methyl, 2′-O-allyl, 2′-C-allyl, 2′-deoxy, or 2′-fluoro. The strands can contain more than one modification. In some embodiments, each residue of the sense strand and antisense strand is independently modified with 2′-O-methyl or 2′-fluoro. It is to be understood that these modifications are in addition to the at least one thermally destabilizing modification of the duplex present in the antisense strand.

[0401] At least two different modifications are typically present on the sense strand and antisense strand. Those two modifications may be the 2′-deoxy, 2′-O-methyl, or 2′-fluoro modifications, acyclic nucleotides or others. In some embodiments, the sense strand and antisense strand each comprises two differently modified nucleotides selected from 2′-O-methyl or 2′-deoxy. In some embodiments, each residue of the sense strand and antisense strand is independently modified with 2′-O-methyl nucleotide, 2′-deoxy nucleotide, 2′-deoxy-2′-fluoro nucleotide, 2′-O—N-methylacetamido (2′-O-NMA) nucleotide, a 2′-O-dimethylaminoethoxyethyl (2′-O-DMAEOE) nucleotide, 2′-O-aminopropyl (2′-O-AP) nucleotide, or 2′-ara-F nucleotide. Again, it is to be understood that these modifications are in addition to the at least one thermally destabilizing modification of the duplex present in the antisense strand.

[0402] In some embodiments, the dsRNA molecule of the disclosure comprises modifications of an alternating pattern, particular in the B1, B2, B3, B1′, B2′, B3′, B4′ regions. The term “alternating motif” or “alternative pattern” as used herein refers to a motif having one or more modifications, each modification occurring on alternating nucleotides of one strand. The alternating nucleotide may refer to one per every other nucleotide or one per every three nucleotides, or a similar pattern. For example, if A, B and C each represent one type of modification to the nucleotide, the alternating motif can be “ABABABABABAB . . . ,” “AABBAABBAABB . . . ,” “AABAABAABAAB . . . ,” “AAABAAABAAAB . . . ,” “AAABBBAAABBB . . . ,” or “ABCABCABCABC . . . ,” etc.

[0403] The type of modifications contained in the alternating motif may be the same or different. For example, if A, B, C, D each represent one type of modification on the nucleotide, the alternating pattern, i.e., modifications on every other nucleotide, may be the same, but each of the sense strand or antisense strand can be selected from several possibilities of modifications within the alternating motif such as “ABABAB . . . ”, “ACACAC . . . ” “BDBDBD . . . ” or “CDCDCD . . . ,” etc.

[0404] In some embodiments, the dsRNA molecule of the disclosure comprises the modification pattern for the alternating motif on the sense strand relative to the modification pattern for the alternating motif on the antisense strand is shifted. The shift may be such that the modified group of nucleotides of the sense strand corresponds to a differently modified group of nucleotides of the antisense strand and vice versa. For example, the sense strand when paired with the antisense strand in the dsRNA duplex, the alternating motif in the sense strand may start with “ABABAB” from 5′-3′ of the strand and the alternating motif in the antisense strand may start with “BABABA” from 3′-5′ of the strand within the duplex region. As another example, the alternating motif in the sense strand may start with “AABBAABB” from 5′-3′ of the strand and the alternating motif in the antisense strand may start with “BBAABBAA” from 3′-5′ of the strand within the duplex region, so that there is a complete or partial shift of the modification patterns between the sense strand and the antisense strand.

[0405] The dsRNA molecule of the disclosure may further comprise at least one phosphorothioate or methylphosphonate internucleotide linkage. The phosphorothioate or methylphosphonate internucleotide linkage modification may occur on any nucleotide of the sense strand or antisense strand or both in any position of the strand. For instance, the internucleotide linkage modification may occur on every nucleotide on the sense strand or antisense strand; each internucleotide linkage modification may occur in an alternating pattern on the sense strand or antisense strand; or the sense strand or antisense strand comprises both internucleotide linkage modifications in an alternating pattern. The alternating pattern of the internucleotide linkage modification on the sense strand may be the same or different from the antisense strand, and the alternating pattern of the internucleotide linkage modification on the sense strand may have a shift relative to the alternating pattern of the internucleotide linkage modification on the antisense strand.

[0406] In some embodiments, the dsRNA molecule comprises the phosphorothioate or methylphosphonate internucleotide linkage modification in the overhang region. For example, the overhang region comprises two nucleotides having a phosphorothioate or methylphosphonate internucleotide linkage between the two nucleotides. Internucleotide linkage modifications also may be made to link the overhang nucleotides with the terminal paired nucleotides within duplex region. For example, at least 2, 3, 4, or all the overhang nucleotides may be linked through phosphorothioate or methylphosphonate internucleotide linkage, and optionally, there may be additional phosphorothioate or methylphosphonate internucleotide linkages linking the overhang nucleotide with a paired nucleotide that is next to the overhang nucleotide. For instance, there may be at least two phosphorothioate internucleotide linkages between the terminal three nucleotides, in which two of the three nucleotides are overhang nucleotides, and the third is a paired nucleotide next to the overhang nucleotide. Preferably, these terminal three nucleotides may be at the 3′-end of the antisense strand.

[0407] In some embodiments, the sense strand of the dsRNA molecule comprises 1-10 blocks of two to ten phosphorothioate or methylphosphonate internucleotide linkages separated by 1, 2, 3, 4, 5, 6, 7, 8, 9, 10, 11, 12, 13, 14, 15, or 16 phosphate internucleotide linkages, wherein one of the phosphorothioate or methylphosphonate internucleotide linkages is placed at any position in the oligonucleotide sequence and the said sense strand is paired with an antisense strand comprising any combination of phosphorothioate, methylphosphonate, and phosphate internucleotide linkages or an antisense strand comprising either phosphorothioate or methylphosphonate or phosphate linkage.

[0408] In some embodiments, the antisense strand of the dsRNA molecule comprises two blocks of two phosphorothioate or methylphosphonate internucleotide linkages separated by 1, 2, 3, 4, 5, 6, 7, 8, 9, 10, 11, 12, 13, 14, 15, 16, 17, or 18 phosphate internucleotide linkages, wherein one of the phosphorothioate or methylphosphonate internucleotide linkages is placed at any position in the oligonucleotide sequence and the said antisense strand is paired with a sense strand comprising any combination of phosphorothioate, methylphosphonate, and phosphate internucleotide linkages or an antisense strand comprising either phosphorothioate or methylphosphonate or phosphate linkage.

[0409] In some embodiments, the antisense strand of the dsRNA molecule comprises two blocks of three phosphorothioate or methylphosphonate internucleotide linkages separated by 1, 2, 3, 4, 5, 6, 7, 8, 9, 10, 11, 12, 13, 14, 15, or 16 phosphate internucleotide linkages, wherein one of the phosphorothioate or methylphosphonate internucleotide linkages is placed at any position in the oligonucleotide sequence and the said antisense strand is paired with a sense strand comprising any combination of phosphorothioate, methylphosphonate, and phosphate internucleotide linkages or an antisense strand comprising either phosphorothioate or methylphosphonate or phosphate linkage.

[0410] In some embodiments, the antisense strand of the dsRNA molecule comprises two blocks of four phosphorothioate or methylphosphonate internucleotide linkages separated by 1, 2, 3, 4, 5, 6, 7, 8, 9, 10, 11, 12, 13, or 14 phosphate internucleotide linkages, wherein one of the phosphorothioate or methylphosphonate internucleotide linkages is placed at any position in the oligonucleotide sequence and the said antisense strand is paired with a sense strand comprising any combination of phosphorothioate, methylphosphonate, and phosphate internucleotide linkages or an antisense strand comprising either phosphorothioate or methylphosphonate or phosphate linkage.

[0411] In some embodiments, the antisense strand of the dsRNA molecule comprises two blocks of five phosphorothioate or methylphosphonate internucleotide linkages separated by 1, 2, 3, 4, 5, 6, 7, 8, 9, 10, 11, or 12 phosphate internucleotide linkages, wherein one of the phosphorothioate or methylphosphonate internucleotide linkages is placed at any position in the oligonucleotide sequence and the said antisense strand is paired with a sense strand comprising any combination of phosphorothioate, methylphosphonate, and phosphate internucleotide linkages or an antisense strand comprising either phosphorothioate or methylphosphonate or phosphate linkage.

[0412] In some embodiments, the antisense strand of the dsRNA molecule comprises two blocks of six phosphorothioate or methylphosphonate internucleotide linkages separated by 1, 2, 3, 4, 5, 6, 7, 8, 9, or 10 phosphate internucleotide linkages, wherein one of the phosphorothioate or methylphosphonate internucleotide linkages is placed at any position in the oligonucleotide sequence and the said antisense strand is paired with a sense strand comprising any combination of phosphorothioate, methylphosphonate, and phosphate internucleotide linkages or an antisense strand comprising either phosphorothioate or methylphosphonate or phosphate linkage.

[0413] In some embodiments, the antisense strand of the dsRNA molecule comprises two blocks of seven phosphorothioate or methylphosphonate internucleotide linkages separated by 1, 2, 3, 4, 5, 6, 7, or 8 phosphate internucleotide linkages, wherein one of the phosphorothioate or methylphosphonate internucleotide linkages is placed at any position in the oligonucleotide sequence and the said antisense strand is paired with a sense strand comprising any combination of phosphorothioate, methylphosphonate, and phosphate internucleotide linkages or an antisense strand comprising either phosphorothioate or methylphosphonate or phosphate linkage.

[0414] In some embodiments, the antisense strand of the dsRNA molecule comprises two blocks of eight phosphorothioate or methylphosphonate internucleotide linkages separated by 1, 2, 3, 4, 5, or 6 phosphate internucleotide linkages, wherein one of the phosphorothioate or methylphosphonate internucleotide linkages is placed at any position in the oligonucleotide sequence and the said antisense strand is paired with a sense strand comprising any combination of phosphorothioate, methylphosphonate, and phosphate internucleotide linkages or an antisense strand comprising either phosphorothioate or methylphosphonate or phosphate linkage.

[0415] In some embodiments, the antisense strand of the dsRNA molecule comprises two blocks of nine phosphorothioate or methylphosphonate internucleotide linkages separated by 1, 2, 3, or 4 phosphate internucleotide linkages, wherein one of the phosphorothioate or methylphosphonate internucleotide linkages is placed at any position in the oligonucleotide sequence and the said antisense strand is paired with a sense strand comprising any combination of phosphorothioate, methylphosphonate, and phosphate internucleotide linkages or an antisense strand comprising either phosphorothioate or methylphosphonate or phosphate linkage.

[0416] In some embodiments, the dsRNA molecule of the disclosure further comprises one or more phosphorothioate or methylphosphonate internucleotide linkage modification within positions 1-10 of the termini position(s) of the sense or antisense strand. For example, at least 2, 3, 4, 5, 6, 7, 8, 9, or 10 nucleotides may be linked through phosphorothioate or methylphosphonate internucleotide linkage at one end or both ends of the sense or antisense strand.

[0417] In some embodiments, the dsRNA molecule of the disclosure further comprises one or more phosphorothioate or methylphosphonate internucleotide linkage modification within positions 1-10 of the internal region of the duplex of each of the sense or antisense strand. For example, at least 2, 3, 4, 5, 6, 7, 8, 9, or 10 nucleotides may be linked through phosphorothioate methylphosphonate internucleotide linkage at position 8-16 of the duplex region counting from the 5′-end of the sense strand; the dsRNA molecule can optionally further comprise one or more phosphorothioate or methylphosphonate internucleotide linkage modification within positions 1-10 of the termini position(s).

[0418] In some embodiments, the dsRNA molecule of the disclosure further comprises one to five phosphorothioate or methylphosphonate internucleotide linkage modification(s) within position 1-5 and one to five phosphorothioate or methylphosphonate internucleotide linkage modification(s) within position 18-23 of the sense strand (counting from the 5′-end), and one to five phosphorothioate or methylphosphonate internucleotide linkage modification at positions 1 and 2 and one to five within positions 18-23 of the antisense strand (counting from the 5′-end).

[0419] In some embodiments, the dsRNA molecule of the disclosure further comprises one phosphorothioate internucleotide linkage modification within position 1-5 and one phosphorothioate or methylphosphonate internucleotide linkage modification within position 18-23 of the sense strand (counting from the 5′-end), and one phosphorothioate internucleotide linkage modification at positions 1 and 2 and two phosphorothioate or methylphosphonate internucleotide linkage modifications within positions 18-23 of the antisense strand (counting from the 5′-end).

[0420] In some embodiments, the dsRNA molecule of the disclosure further comprises two phosphorothioate internucleotide linkage modifications within position 1-5 and one phosphorothioate internucleotide linkage modification within position 18-23 of the sense strand (counting from the 5′-end), and one phosphorothioate internucleotide linkage modification at positions 1 and 2 and two phosphorothioate internucleotide linkage modifications within positions 18-23 of the antisense strand (counting from the 5′-end).

[0421] In some embodiments, the dsRNA molecule of the disclosure further comprises two phosphorothioate internucleotide linkage modifications within position 1-5 and two phosphorothioate internucleotide linkage modifications within position 18-23 of the sense strand (counting from the 5′-end), and one phosphorothioate internucleotide linkage modification at positions 1 and 2 and two phosphorothioate internucleotide linkage modifications within positions 18-23 of the antisense strand (counting from the 5′-end).

[0422] In some embodiments, the dsRNA molecule of the disclosure further comprises two phosphorothioate internucleotide linkage modifications within position 1-5 and two phosphorothioate internucleotide linkage modifications within position 18-23 of the sense strand (counting from the 5′-end), and one phosphorothioate internucleotide linkage modification at positions 1 and 2 and one phosphorothioate internucleotide linkage modification within positions 18-23 of the antisense strand (counting from the 5′-end).

[0423] In some embodiments, the dsRNA molecule of the disclosure further comprises one phosphorothioate internucleotide linkage modification within position 1-5 and one phosphorothioate internucleotide linkage modification within position 18-23 of the sense strand (counting from the 5′-end), and two phosphorothioate internucleotide linkage modifications at positions 1 and 2 and two phosphorothioate internucleotide linkage modifications within positions 18-23 of the antisense strand (counting from the 5′-end).

[0424] In some embodiments, the dsRNA molecule of the disclosure further comprises one phosphorothioate internucleotide linkage modification within position 1-5 and one within position 18-23 of the sense strand (counting from the 5′-end), and two phosphorothioate internucleotide linkage modification at positions 1 and 2 and one phosphorothioate internucleotide linkage modification within positions 18-23 of the antisense strand (counting from the 5′-end).

[0425] In some embodiments, the dsRNA molecule of the disclosure further comprises one phosphorothioate internucleotide linkage modification within position 1-5 (counting from the 5′-end) of the sense strand, and two phosphorothioate internucleotide linkage modifications at positions 1 and 2 and one phosphorothioate internucleotide linkage modification within positions 18-23 of the antisense strand (counting from the 5′-end).

[0426] In some embodiments, the dsRNA molecule of the disclosure further comprises two phosphorothioate internucleotide linkage modifications within position 1-5 (counting from the 5′-end) of the sense strand, and one phosphorothioate internucleotide linkage modification at positions 1 and 2 and two phosphorothioate internucleotide linkage modifications within positions 18-23 of the antisense strand (counting from the 5′-end).

[0427] In some embodiments, the dsRNA molecule of the disclosure further comprises two phosphorothioate internucleotide linkage modifications within position 1-5 and one within position 18-23 of the sense strand (counting from the 5′-end), and two phosphorothioate internucleotide linkage modifications at positions 1 and 2 and one phosphorothioate internucleotide linkage modification within positions 18-23 of the antisense strand (counting from the 5′-end).

[0428] In some embodiments, the dsRNA molecule of the disclosure further comprises two phosphorothioate internucleotide linkage modifications within position 1-5 and one phosphorothioate internucleotide linkage modification within position 18-23 of the sense strand (counting from the 5′-end), and two phosphorothioate internucleotide linkage modifications at positions 1 and 2 and two phosphorothioate internucleotide linkage modifications within positions 18-23 of the antisense strand (counting from the 5′-end).

[0429] In some embodiments, the dsRNA molecule of the disclosure further comprises two phosphorothioate internucleotide linkage modifications within position 1-5 and one phosphorothioate internucleotide linkage modification within position 18-23 of the sense strand (counting from the 5′-end), and one phosphorothioate internucleotide linkage modification at positions 1 and 2 and two phosphorothioate internucleotide linkage modifications within positions 18-23 of the antisense strand (counting from the 5′-end).

[0430] In some embodiments, the dsRNA molecule of the disclosure further comprises two phosphorothioate internucleotide linkage modifications at position 1 and 2, and two phosphorothioate internucleotide linkage modifications at position 20 and 21 of the sense strand (counting from the 5′-end), and one phosphorothioate internucleotide linkage modification at positions 1 and one at position 21 of the antisense strand (counting from the 5′-end).

[0431] In some embodiments, the dsRNA molecule of the disclosure further comprises one phosphorothioate internucleotide linkage modification at position 1, and one phosphorothioate internucleotide linkage modification at position 21 of the sense strand (counting from the 5′-end), and two phosphorothioate internucleotide linkage modifications at positions 1 and 2 and two phosphorothioate internucleotide linkage modifications at positions 20 and 21 the antisense strand (counting from the 5′-end).

[0432] In some embodiments, the dsRNA molecule of the disclosure further comprises two phosphorothioate internucleotide linkage modifications at position 1 and 2, and two phosphorothioate internucleotide linkage modifications at position 21 and 22 of the sense strand (counting from the 5′-end), and one phosphorothioate internucleotide linkage modification at positions 1 and one phosphorothioate internucleotide linkage modification at position 21 of the antisense strand (counting from the 5′-end).

[0433] In some embodiments, the dsRNA molecule of the disclosure further comprises one phosphorothioate internucleotide linkage modification at position 1, and one phosphorothioate internucleotide linkage modification at position 21 of the sense strand (counting from the 5′-end), and two phosphorothioate internucleotide linkage modifications at positions 1 and 2 and two phosphorothioate internucleotide linkage modifications at positions 21 and 22 the antisense strand (counting from the 5′-end).

[0434] In some embodiments, the dsRNA molecule of the disclosure further comprises two phosphorothioate internucleotide linkage modifications at position 1 and 2, and two phosphorothioate internucleotide linkage modifications at position 22 and 23 of the sense strand (counting from the 5′-end), and one phosphorothioate internucleotide linkage modification at positions 1 and one phosphorothioate internucleotide linkage modification at position 21 of the antisense strand (counting from the 5′-end).

[0435] In some embodiments, the dsRNA molecule of the disclosure further comprises one phosphorothioate internucleotide linkage modification at position 1, and one phosphorothioate internucleotide linkage modification at position 21 of the sense strand (counting from the 5′-end), and two phosphorothioate internucleotide linkage modifications at positions 1 and 2 and two phosphorothioate internucleotide linkage modifications at positions 23 and 23 the antisense strand (counting from the 5′-end).

[0436] In some embodiments, compound of the disclosure comprises a pattern of backbone chiral centers. In some embodiments, a common pattern of backbone chiral centers comprises at least 5 internucleotidic linkages in the Sp configuration. In some embodiments, a common pattern of backbone chiral centers comprises at least 6 internucleotidic linkages in the Sp configuration. In some embodiments, a common pattern of backbone chiral centers comprises at least 7 internucleotidic linkages in the Sp configuration. In some embodiments, a common pattern of backbone chiral centers comprises at least 8 internucleotidic linkages in the Sp configuration. In some embodiments, a common pattern of backbone chiral centers comprises at least 9 internucleotidic linkages in the Sp configuration. In some embodiments, a common pattern of backbone chiral centers comprises at least 10 internucleotidic linkages in the Sp configuration. In some embodiments, a common pattern of backbone chiral centers comprises at least 11 internucleotidic linkages in the Sp configuration. In some embodiments, a common pattern of backbone chiral centers comprises at least 12 internucleotidic linkages in the Sp configuration. In some embodiments, a common pattern of backbone chiral centers comprises at least 13 internucleotidic linkages in the Sp configuration. In some embodiments, a common pattern of backbone chiral centers comprises at least 14 internucleotidic linkages in the Sp configuration. In some embodiments, a common pattern of backbone chiral centers comprises at least 15 internucleotidic linkages in the Sp configuration. In some embodiments, a common pattern of backbone chiral centers comprises at least 16 internucleotidic linkages in the Sp configuration. In some embodiments, a common pattern of backbone chiral centers comprises at least 17 internucleotidic linkages in the Sp configuration. In some embodiments, a common pattern of backbone chiral centers comprises at least 18 internucleotidic linkages in the Sp configuration. In some embodiments, a common pattern of backbone chiral centers comprises at least 19 internucleotidic linkages in the Sp configuration. In some embodiments, a common pattern of backbone chiral centers comprises no more than 8 internucleotidic linkages in the Rp configuration. In some embodiments, a common pattern of backbone chiral centers comprises no more than 7 internucleotidic linkages in the Rp configuration. In some embodiments, a common pattern of backbone chiral centers comprises no more than 6 internucleotidic linkages in the Rp configuration. In some embodiments, a common pattern of backbone chiral centers comprises no more than 5 internucleotidic linkages in the Rp configuration. In some embodiments, a common pattern of backbone chiral centers comprises no more than 4 internucleotidic linkages in the Rp configuration. In some embodiments, a common pattern of backbone chiral centers comprises no more than 3 internucleotidic linkages in the Rp configuration. In some embodiments, a common pattern of backbone chiral centers comprises no more than 2 internucleotidic linkages in the Rp configuration. In some embodiments, a common pattern of backbone chiral centers comprises no more than 1 internucleotidic linkages in the Rp configuration. In some embodiments, a common pattern of backbone chiral centers comprises no more than 8 internucleotidic linkages which are not chiral (as a non-limiting example, a phosphodiester). In some embodiments, a common pattern of backbone chiral centers comprises no more than 7 internucleotidic linkages which are not chiral. In some embodiments, a common pattern of backbone chiral centers comprises no more than 6 internucleotidic linkages which are not chiral. In some embodiments, a common pattern of backbone chiral centers comprises no more than 5 internucleotidic linkages which are not chiral. In some embodiments, a common pattern of backbone chiral centers comprises no more than 4 internucleotidic linkages which are not chiral. In some embodiments, a common pattern of backbone chiral centers comprises no more than 3 internucleotidic linkages which are not chiral. In some embodiments, a common pattern of backbone chiral centers comprises no more than 2 internucleotidic linkages which are not chiral. In some embodiments, a common pattern of backbone chiral centers comprises no more than 1 internucleotidic linkages which are not chiral. In some embodiments, a common pattern of backbone chiral centers comprises at least 10 internucleotidic linkages in the Sp configuration, and no more than 8 internucleotidic linkages which are not chiral. In some embodiments, a common pattern of backbone chiral centers comprises at least 11 internucleotidic linkages in the Sp configuration, and no more than 7 internucleotidic linkages which are not chiral. In some embodiments, a common pattern of backbone chiral centers comprises at least 12 internucleotidic linkages in the Sp configuration, and no more than 6 internucleotidic linkages which are not chiral. In some embodiments, a common pattern of backbone chiral centers comprises at least 13 internucleotidic linkages in the Sp configuration, and no more than 6 internucleotidic linkages which are not chiral. In some embodiments, a common pattern of backbone chiral centers comprises at least 14 internucleotidic linkages in the Sp configuration, and no more than 5 internucleotidic linkages which are not chiral. In some embodiments, a common pattern of backbone chiral centers comprises at least 15 internucleotidic linkages in the Sp configuration, and no more than 4 internucleotidic linkages which are not chiral. In some embodiments, the internucleotidic linkages in the Sp configuration are optionally contiguous or not contiguous. In some embodiments, the internucleotidic linkages in the Rp configuration are optionally contiguous or not contiguous. In some embodiments, the internucleotidic linkages which are not chiral are optionally contiguous or not contiguous.

[0437] In some embodiments, compound of the disclosure comprises a block is a stereochemistry block. In some embodiments, a block is an Rp block in that each internucleotidic linkage of the block is Rp. In some embodiments, a 5′-block is an Rp block. In some embodiments, a 3′-block is an Rp block. In some embodiments, a block is an Sp block in that each internucleotidic linkage of the block is Sp. In some embodiments, a 5′-block is an Sp block. In some embodiments, a 3′-block is an Sp block. In some embodiments, provided oligonucleotides comprise both Rp and Sp blocks. In some embodiments, provided oligonucleotides comprise one or more Rp but no Sp blocks. In some embodiments, provided oligonucleotides comprise one or more Sp but no Rp blocks. In some embodiments, provided oligonucleotides comprise one or more PO blocks wherein each internucleotidic linkage in a natural phosphate linkage.

[0438] In some embodiments, compound of the disclosure comprises a 5′-block is an Sp block wherein each sugar moiety comprises a 2′-F modification. In some embodiments, a 5′-block is an Sp block wherein each of internucleotidic linkage is a modified internucleotidic linkage and each sugar moiety comprises a 2′-F modification. In some embodiments, a 5′-block is an Sp block wherein each of internucleotidic linkage is a phosphorothioate linkage and each sugar moiety comprises a 2′-F modification. In some embodiments, a 5′-block comprises 4 or more nucleoside units. In some embodiments, a 5′-block comprises 5 or more nucleoside units. In some embodiments, a 5′-block comprises 6 or more nucleoside units. In some embodiments, a 5′-block comprises 7 or more nucleoside units. In some embodiments, a 3′-block is an Sp block wherein each sugar moiety comprises a 2′-F modification. In some embodiments, a 3′-block is an Sp block wherein each of internucleotidic linkage is a modified internucleotidic linkage and each sugar moiety comprises a 2′-F modification. In some embodiments, a 3′-block is an Sp block wherein each of internucleotidic linkage is a phosphorothioate linkage and each sugar moiety comprises a 2′-F modification. In some embodiments, a 3′-block comprises 4 or more nucleoside units. In some embodiments, a 3′-block comprises 5 or more nucleoside units. In some embodiments, a 3′-block comprises 6 or more nucleoside units. In some embodiments, a 3′-block comprises 7 or more nucleoside units.

[0439] In some embodiments, compound of the disclosure comprises a type of nucleoside in a region or an oligonucleotide is followed by a specific type of internucleotidic linkage, e.g., natural phosphate linkage, modified internucleotidic linkage, Rp chiral internucleotidic linkage, Sp chiral internucleotidic linkage, etc. In some embodiments, A is followed by Sp. In some embodiments, A is followed by Rp. In some embodiments, A is followed by natural phosphate linkage (PO). In some embodiments, U is followed by Sp. In some embodiments, U is followed by Rp. In some embodiments, U is followed by natural phosphate linkage (PO). In some embodiments, C is followed by Sp. In some embodiments, C is followed by Rp. In some embodiments, C is followed by natural phosphate linkage (PO). In some embodiments, G is followed by Sp. In some embodiments, G is followed by Rp. In some embodiments, G is followed by natural phosphate linkage (PO). In some embodiments, C and U are followed by Sp. In some embodiments, C and U are followed by Rp. In some embodiments, C and U are followed by natural phosphate linkage (PO). In some embodiments, A and G are followed by Sp. In some embodiments, A and G are followed by Rp.

[0440] In some embodiments, the dsRNA molecule of the disclosure comprises mismatch(es) with the target, within the duplex, or combinations thereof. The mismatch can occur in the overhang region or the duplex region. The base pair can be ranked on the basis of their propensity to promote dissociation or melting (e.g., on the free energy of association or dissociation of a particular pairing, the simplest approach is to examine the pairs on an individual pair basis, though next neighbor or similar analysis can also be used). In terms of promoting dissociation: A:U is preferred over G:C; G:U is preferred over G:C; and I:C is preferred over G:C (I=inosine). Mismatches, e.g., non-canonical or other than canonical pairings (as described elsewhere herein) are preferred over canonical (A:T, A:U, G:C) pairings; and pairings which include a universal base are preferred over canonical pairings.

[0441] In some embodiments, the dsRNA molecule of the disclosure comprises at least one of the first 1, 2, 3, 4, or 5 base pairs within the duplex regions from the 5′-end of the antisense strand can be chosen independently from the group of: A:U, G:U, I:C, and mismatched pairs, e.g., non-canonical or other than canonical pairings or pairings which include a universal base, to promote the dissociation of the antisense strand at the 5′-end of the duplex.

[0442] In some embodiments, the nucleotide at the 1 position within the duplex region from the 5′-end in the antisense strand is selected from the group consisting of A, dA, dU, U, and dT. Alternatively, at least one of the first 1, 2 or 3 base pair within the duplex region from the 5′-end of the antisense strand is an AU base pair. For example, the first base pair within the duplex region from the 5′-end of the antisense strand is an AU base pair.

[0443] It was found that introducing 4′-modified or 5′-modified nucleotide to the 3′-end of a phosphodiester (PO), phosphorothioate (PS), or phosphorodithioate (PS2) linkage of a dinucleotide at any position of single stranded or double stranded oligonucleotide can exert steric effect to the internucleotide linkage and, hence, protecting or stabilizing it against nucleases.

[0444] In some embodiments, 5′-modified nucleoside is introduced at the 3′-end of a dinucleotide at any position of single stranded or double stranded siRNA. For instance, a 5′-alkylated nucleoside may be introduced at the 3′-end of a dinucleotide at any position of single stranded or double stranded siRNA. The alkyl group at the 5′ position of the ribose sugar can be racemic or chirally pure R or S isomer. An exemplary 5′-alkylated nucleoside is 5′-methyl nucleoside. The 5′-methyl can be either racemic or chirally pure R or S isomer.

[0445] In some embodiments, 4′-modified nucleoside is introduced at the 3′-end of a dinucleotide at any position of single stranded or double stranded siRNA. For instance, a 4′-alkylated nucleoside may be introduced at the 3′-end of a dinucleotide at any position of single stranded or double stranded siRNA. The alkyl group at the 4′ position of the ribose sugar can be racemic or chirally pure R or S isomer. An exemplary 4′-alkylated nucleoside is 4′-methyl nucleoside. The 4′-methyl can be either racemic or chirally pure R or S isomer. Alternatively, a 4′-O-alkylated nucleoside may be introduced at the 3′-end of a dinucleotide at any position of single stranded or double stranded siRNA. The 4′-O-alkyl of the ribose sugar can be racemic or chirally pure R or S isomer. An exemplary 4′-O-alkylated nucleoside is 4′-O-methyl nucleoside. The 4′-O-methyl can be either racemic or chirally pure R or S isomer.

[0446] In some embodiments, 5′-alkylated nucleoside is introduced at any position on the sense strand or antisense strand of a dsRNA, and such modification maintains or improves potency of the dsRNA. The 5′-alkyl can be either racemic or chirally pure R or S isomer. An exemplary 5′-alkylated nucleoside is 5′-methyl nucleoside. The 5′-methyl can be either racemic or chirally pure R or S isomer.

[0447] In some embodiments, 4′-alkylated nucleoside is introduced at any position on the sense strand or antisense strand of a dsRNA, and such modification maintains or improves potency of the dsRNA. The 4′-alkyl can be either racemic or chirally pure R or S isomer. An exemplary 4′-alkylated nucleoside is 4′-methyl nucleoside. The 4′-methyl can be either racemic or chirally pure R or S isomer.

[0448] In some embodiments, 4′-O-alkylated nucleoside is introduced at any position on the sense strand or antisense strand of a dsRNA, and such modification maintains or improves potency of the dsRNA. The 5′-alkyl can be either racemic or chirally pure R or S isomer. An exemplary 4′-O-alkylated nucleoside is 4′-O-methyl nucleoside. The 4′-O-methyl can be either racemic or chirally pure R or S isomer.

[0449] In some embodiments, the dsRNA molecule of the disclosure can comprise 2′-5′ linkages (with 2′-H, 2′-OH, and 2′-OMe and with P═O or P═S). For example, the 2′-5′ linkages modifications can be used to promote nuclease resistance or to inhibit binding of the sense to the antisense strand, or can be used at the 5′ end of the sense strand to avoid sense strand activation by RISC.

[0450] In another embodiment, the dsRNA molecule of the disclosure can comprise L sugars (e.g., L ribose, L-arabinose with 2′-H, 2′-OH and 2′-OMe). For example, these L sugars modifications can be used to promote nuclease resistance or to inhibit binding of the sense to the antisense strand, or can be used at the 5′ end of the sense strand to avoid sense strand activation by RISC.

[0451] Various publications describe multimeric siRNA which can all be used with the dsRNA of the disclosure. Such publications include WO2007/091269, U.S. Pat. No. 7,858,769, WO2010/141511, WO2007/11768 6, WO2009/014887, and WO2011/031520 which are hereby incorporated by their entirely.

[0452] In some embodiments dsRNA molecules of the disclosure are 5′ phosphorylated or include a phosphoryl analog at the 5′ prime terminus. 5′-phosphate modifications include those which are compatible with RISC mediated gene silencing. Suitable modifications include: 5′-monophosphate ((HO)₂(O)P—O-5′); 5′-diphosphate ((HO)₂(O)P—O—P(HO)(O)—O-5′); 5′-triphosphate ((HO)₂(O)P—O—(HO)(O)P—O—P(HO)(O)—O-5′); 5′-guanosine cap (7-methylated or non-methylated) (7m-G-O-5′-(HO)(O)P—O—(HO)(O)P—O—P(HO)(O)—O-5′); 5′-adenosine cap (Appp), and any modified or unmodified nucleotide cap structure (N—O-5′-(HO)(O)P—O—(HO)(O)P—O—P(HO)(O)—O-5′); 5′-monothiophosphate (phosphorothioate; (HO)₂(S)P—O-5′); 5′-monodithiophosphate (phosphorodithioate; (HO)(HS)(S)P—O-5′), 5′-phosphorothiolate ((HO)2(O)P—S-5′); any additional combination of oxygen/sulfur replaced monophosphate, diphosphate and triphosphates (e.g. 5′-alpha-thiotriphosphate, 5′-gamma-thiotriphosphate, etc.), 5′-phosphoramidates ((HO)₂(O)P—NH-5′, (HO)(NH₂)(O)P—O-5′), 5′-alkylphosphonates (R═alkyl=methyl, ethyl, isopropyl, propyl, etc., e.g. RP(OH)(O)—O-5′-, 5′-alkenylphosphonates (i.e. vinyl, substituted vinyl), (OH)₂(O)P-5′-CH₂—), 5′-alkyletherphosphonates (R═alkylether=methoxymethyl (MeOCH2-), ethoxymethyl, etc., e.g. RP(OH)(O)—O-5′-). In one example, the modification can in placed in the antisense strand of a dsRNA molecule.

### F. Linkers

[0453] In some embodiments, the conjugate or ligand described herein can be attached to an iRNA oligonucleotide with various linkers that can be cleavable or non-cleavable.

[0454] Linkers typically comprise a direct bond or an atom such as oxygen or sulfur, a unit such as NR8, C(O), C(O)NH, SO, SO₂, SO₂NH or a chain of atoms, such as, but not limited to, substituted or unsubstituted alkyl, substituted or unsubstituted alkenyl, substituted or unsubstituted alkynyl, arylalkyl, arylalkenyl, arylalkynyl, heteroarylalkyl, heteroarylalkenyl, heteroarylalkynyl, heterocyclylalkyl, heterocyclylalkenyl, heterocyclylalkynyl, aryl, heteroaryl, heterocyclyl, cycloalkyl, cycloalkenyl, alkylarylalkyl, alkylarylalkenyl, alkylarylalkynyl, alkenylarylalkyl, alkenylarylalkenyl, alkenylarylalkynyl, alkynylarylalkyl, alkynylarylalkenyl, alkynylarylalkynyl, alkylheteroarylalkyl, alkylheteroarylalkenyl, alkylheteroarylalkynyl, alkenylheteroarylalkyl, alkenylheteroarylalkenyl, alkenylheteroarylalkynyl, alkynylheteroarylalkyl, alkynylheteroarylalkenyl, alkynylheteroarylalkynyl, alkylheterocyclylalkyl, alkylheterocyclylalkenyl, alkylhererocyclylalkynyl, alkenylheterocyclylalkyl, alkenylheterocyclylalkenyl, alkenylheterocyclylalkynyl, alkynylheterocyclylalkyl, alkynylheterocyclylalkenyl, alkynylheterocyclylalkynyl, alkylaryl, alkenylaryl, alkynylaryl, alkylheteroaryl, alkenylheteroaryl, alkynylhereroaryl, which one or more methylenes can be interrupted or terminated by O, S, S(O), SO₂, N(R8), C(O), substituted or unsubstituted aryl, substituted or unsubstituted heteroaryl, substituted or unsubstituted heterocyclic; where R8 is hydrogen, acyl, aliphatic or substituted aliphatic. In some embodiments, the linker is between about 1-24 atoms, 2-24, 3-24, 4-24, 5-24, 6-24, 6-18, 7-18, 8-18 atoms, 7-17, 8-17, 6-16, 7-16, or 8-16 atoms.

[0455] In some embodiments, a dsRNA of the disclosure is conjugated to a bivalent or trivalent branched linker selected from the group of structures shown in any of formula (XXXI)-(XXXIV):

[chemical structure]

[0456] wherein:

[0457] q2A, q2B, q3A, q3B, q4A, q4B q5A, q5B and q5C represent independently for each occurrence 0-20 and wherein the repeating unit can be the same or different;

[0458] P^{2A} p^{2B}, p^{3A}, P^{3B}, P^{4A}, P^{4B}, P^{5A}, P^{5B}, P^{5C}, T^{2A}, T^{2B}, T^{3A}, T^{3B}, T^{4A}, T^{4B}, T^{5B}, T^{5C} are each independently for each occurrence absent, CO, NH, O, S, OC(O), NHC(O) CH₂, CH₂NH or CH₂O;

[0459] Q^{2A}, Q^{2B}, Q^{3A}, Q^{3B}, Q^{4A}, Q^{4B}, Q^{5A}, Q^{5B}, Q^{5C} are independently for each occurrence absent, alkylene, substituted alkylene wherein one or more methylenes can be interrupted or terminated by one or more of O, S, S(O), SO₂, N(R^{N}), C(R′)═C(R″), C≡C or C(O);

[0460] R^{2A}, R^{2B}, R^{3A}, R^{3B}, R^{4A}, R^{4B}, R^{5A}, R^{5B}, R^{5C} are each independently for each occurrence absent, NH, O, S CH₂, C(O)O, C(O)NH, NHCH(R^{a})C(O), —C(O)—CH(R^{a})—NH—, CO, CH═N—O,

[chemical structure]

[0461] L^{2A}, L^{2B}, L^{3A}, L^{3B}, L^{4A}, L^{4B}, L^{5A}, L^{5B} and L^{5C} represent the ligand; i.e. each independently for each occurrence a monosaccharide (such as GalNAc), disaccharide, trisaccharide, tetrasaccharide, oligosaccharide, or polysaccharide; and Ra is H or amino acid side chain. Trivalent conjugating GalNAc derivatives are particularly useful for use with RNAi agents for inhibiting the expression of a target gene, such as those of formula (XXXV):

[chemical structure]

[0462] wherein L^{5A}, L^{5B} and L^{5C} represent a monosaccharide, such as GalNAc derivative.

[0463] Examples of suitable bivalent and trivalent branched linker groups conjugating GalNAc derivatives include, but are not limited to, the structures recited above as formulas II, VII, XI, X, and XIII.

[0464] A cleavable linking group is one which is sufficiently stable outside the cell, but which upon entry into a target cell is cleaved to release the two parts the linker is holding together. In a some embodiments, the cleavable linking group is cleaved at least about 10 times, 20, times, 30 times, 40 times, 50 times, 60 times, 70 times, 80 times, 90 times or more, or at least about 100 times faster in a target cell or under a first reference condition (which can, e.g., be selected to mimic or represent intracellular conditions) than in the blood of a subject, or under a second reference condition (which can, e.g., be selected to mimic or represent conditions found in the blood or serum).

[0465] Cleavable linking groups are susceptible to cleavage agents, e.g., pH, redox potential or the presence of degradative molecules. Generally, cleavage agents are more prevalent or found at higher levels or activities inside cells than in serum or blood. Examples of such degradative agents include: redox agents which are selected for particular substrates or which have no substrate specificity, including, e.g., oxidative or reductive enzymes or reductive agents such as mercaptans, present in cells, that can degrade a redox cleavable linking group by reduction; esterases; endosomes or agents that can create an acidic environment, e.g., those that result in a pH of five or lower; enzymes that can hydrolyze or degrade an acid cleavable linking group by acting as a general acid, peptidases (which can be substrate specific), and phosphatases.

[0466] A cleavable linkage group, such as a disulfide bond can be susceptible to pH. The pH of human serum is 7.4, while the average intracellular pH is slightly lower, ranging from about 7.1-7.3. Endosomes have a more acidic pH, in the range of 5.5-6.0, and lysosomes have an even more acidic pH at around 5.0. Some linkers will have a cleavable linking group that is cleaved at a suitable pH, thereby releasing a cationic lipid from the ligand inside the cell, or into the desired compartment of the cell.

[0467] A linker can include a cleavable linking group that is cleavable by a particular enzyme. The type of cleavable linking group incorporated into a linker can depend on the cell to be targeted.

[0468] In general, the suitability of a candidate cleavable linking group can be evaluated by testing the ability of a degradative agent (or condition) to cleave the candidate linking group. It will also be desirable to also test the candidate cleavable linking group for the ability to resist cleavage in the blood or when in contact with other non-target tissue. Thus, one can determine the relative susceptibility to cleavage between a first and a second condition, where the first is selected to be indicative of cleavage in a target cell and the second is selected to be indicative of cleavage in other tissues or biological fluids, e.g., blood or serum. The evaluations can be carried out in cell free systems, in cells, in cell culture, in organ or tissue culture, or in whole animals. It can be useful to make initial evaluations in cell-free or culture conditions and to confirm by further evaluations in whole animals. In some embodiments, useful candidate compounds are cleaved at least about 2, 4, 10, 20, 30, 40, 50, 60, 70, 80, 90, or about 100 times faster in the cell (or under in vitro conditions selected to mimic intracellular conditions) as compared to blood or serum (or under in vitro conditions selected to mimic extracellular conditions).

i. Redox Cleavable Linking Groups

[0469] In some embodiments, a cleavable linking group is a redox cleavable linking group that is cleaved upon reduction or oxidation. An example of reductively cleavable linking group is a disulphide linking group (—S—S—). To determine if a candidate cleavable linking group is a suitable “reductively cleavable linking group,” or for example is suitable for use with a particular iRNA moiety and particular targeting agent one can look to methods described herein. For example, a candidate can be evaluated by incubation with dithiothreitol (DTT), or other reducing agent using reagents know in the art, which mimic the rate of cleavage which would be observed in a cell, e.g., a target cell. The candidates can also be evaluated under conditions which are selected to mimic blood or serum conditions. In one, candidate compounds are cleaved by at most about 10% in the blood. In other embodiments, useful candidate compounds are degraded at least about 2, 4, 10, 20, 30, 40, 50, 60, 70, 80, 90, or about 100 times faster in the cell (or under in vitro conditions selected to mimic intracellular conditions) as compared to blood (or under in vitro conditions selected to mimic extracellular conditions). The rate of cleavage of candidate compounds can be determined using standard enzyme kinetics assays under conditions chosen to mimic intracellular media and compared to conditions chosen to mimic extracellular media.

ii. Phosphate-Based Cleavable Linking Groups

[0470] In some embodiments, a cleavable linker comprises a phosphate-based cleavable linking group. A phosphate-based cleavable linking group is cleaved by agents that degrade or hydrolyze the phosphate group. An example of an agent that cleaves phosphate groups in cells are enzymes such as phosphatases in cells. Examples of phosphate-based linking groups are —O—P(O)(ORk)-O—, —O—P(S)(ORk)-O—, —O—P(S)(SRk)-O—, —S—P(O)(ORk)-O—, —O—P(O)(ORk)-S—, —S—P(O)(ORk)-S—, —O—P(S)(ORk)-S—, —S—P(S)(ORk)-O—, —O—P(O)(Rk)-O—, —O—P(S)(Rk)-O—, —S—P(O)(Rk)-O—, —S—P(S)(Rk)-O—, —S—P(O)(Rk)-S—, —O—P(S)(Rk)-S—. In some embodiments, phosphate-based linking groups are —O—P(O)(OH)—O—, —O—P(S)(OH)—O—, —O—P(S)(SH)—O—, —S—P(O)(OH)—O—, —O—P(O)(OH)—S—, —S—P(O)(OH)—S—, —O—P(S)(OH)—S—, —S—P(S)(OH)—O—, —O—P(O)(H)—O—, —O—P(S)(H)—O—, —S—P(O)(H)—O, —S—P(S)(H)—O—, —S—P(O)(H)—S—, —O—P(S)(H)—S—. In some embodiments, a phosphate-based linking group is —O—P(O)(OH)—O—. These candidates can be evaluated using methods analogous to those described above.

iii. Acid Cleavable Linking Groups

[0471] In some embodiments, a cleavable linker comprises an acid cleavable linking group. An acid cleavable linking group is a linking group that is cleaved under acidic conditions. In some embodiments acid cleavable linking groups are cleaved in an acidic environment with a pH of about 6.5 or lower (e.g., about 6.0, 5.75, 5.5, 5.25, 5.0, or lower), or by agents such as enzymes that can act as a general acid. In a cell, specific low pH organelles, such as endosomes and lysosomes can provide a cleaving environment for acid cleavable linking groups. Examples of acid cleavable linking groups include but are not limited to hydrazones, esters, and esters of amino acids. Acid cleavable groups can have the general formula —C═NN—, C(O)O, or —OC(O). In some embodiments, the carbon attached to the oxygen of the ester (the alkoxy group) is an aryl group, substituted alkyl group, or tertiary alkyl group such as dimethyl pentyl or t-butyl. These candidates can be evaluated using methods analogous to those described above.

### IV. ESTER-BASED CLEAVABLE LINKING GROUPS

[0472] In some embodiments, a cleavable linker comprises an ester-based cleavable linking group. An ester-based cleavable linking group is cleaved by enzymes such as esterases and amidases in cells. Examples of ester-based cleavable linking groups include but are not limited to esters of alkylene, alkenylene and alkynylene groups. Ester cleavable linking groups have the general formula —C(O)O—, or —OC(O)—. These candidates can be evaluated using methods analogous to those described above.

### V. PEPTIDE-BASED CLEAVABLE LINKING GROUPS

[0473] In some embodiments, a cleavable linker comprises a peptide-based cleavable linking group. A peptide-based cleavable linking group is cleaved by enzymes such as peptidases and proteases in cells. Peptide-based cleavable linking groups are peptide bonds formed between amino acids to yield oligopeptides (e.g., dipeptides, tripeptides etc.) and polypeptides. Peptide-based cleavable groups do not include the amide group (—C(O)NH—). The amide group can be formed between any alkylene, alkenylene or alkynelene. A peptide bond is a special type of amide bond formed between amino acids to yield peptides and proteins. The peptide-based cleavage group is generally limited to the peptide bond (i.e., the amide bond) formed between amino acids yielding peptides and proteins and does not include the entire amide functional group. Peptide-based cleavable linking groups have the general formula -NHCHRAC(O)NHCHRBC(O)—, where RA and RB are the R groups of the two adjacent amino acids. These candidates can be evaluated using methods analogous to those described above. Representative U.S. patents that teach the preparation of RNA conjugates include, but are not limited to, U.S. Pat. Nos. 4,828,979; 4,948,882; 5,218,105; 5,525,465; 5,541,313; 5,545,730; 5,552,538; 5,578,717, 5,580,731; 5,591,584; 5,109,124; 5,118,802; 5,138,045; 5,414,077; 5,486,603; 5,512,439; 5,578,718; 5,608,046; 4,587,044; 4,605,735; 4,667,025; 4,762,779; 4,789,737; 4,824,941; 4,835,263; 4,876,335; 4,904,582; 4,958,013; 5,082,830; 5,112,963; 5,214,136; 5,082,830; 5,112,963; 5,214,136; 5,245,022; 5,254,469; 5,258,506; 5,262,536; 5,272,250; 5,292,873; 5,317,098; 5,371,241, 5,391,723; 5,416,203, 5,451,463; 5,510,475; 5,512,667; 5,514,785; 5,565,552; 5,567,810; 5,574,142; 5,585,481; 5,587,371; 5,595,726; 5,597,696; 5,599,923; 5,599,928 and 5,688,941; 6,294,664; 6,320,017; 6,576,752; 6,783,931; 6,900,297; 7,037,646; 8,106,022, the entire contents of each of which is herein incorporated by reference.

[0474] It is not necessary for all positions in a given compound to be uniformly modified, and in fact more than one of the aforementioned modifications may be incorporated in a single compound or even at a single nucleoside within an iRNA. The present disclosure also includes iRNA compounds that are chimeric compounds.

[0475] “Chimeric” iRNA compounds, or “chimeras,” in the context of the present disclosure, are iRNA compounds, e.g., dsRNAs, that contain two or more chemically distinct regions, each made up of at least one monomer unit, i.e., a nucleotide in the case of a dsRNA compound. These iRNAs typically contain at least one region wherein the RNA is modified so as to confer upon the iRNA increased resistance to nuclease degradation, increased cellular uptake, and/or increased binding affinity for the target nucleic acid. An additional region of the iRNA may serve as a substrate for enzymes capable of cleaving RNA:DNA or RNA:RNA hybrids. By way of example, RNase H is a cellular endonuclease which cleaves the RNA strand of an RNA:DNA duplex. Activation of RNase H, therefore, results in cleavage of the RNA target, thereby greatly enhancing the efficiency of iRNA inhibition of gene expression. Consequently, comparable results can often be obtained with shorter iRNAs when chimeric dsRNAs are used, compared to phosphorothioate deoxy dsRNAs hybridizing to the same target region. Cleavage of the RNA target can be routinely detected by gel electrophoresis and, if necessary, associated nucleic acid hybridization techniques known in the art.

[0476] In certain instances, the RNA of an iRNA can be modified by a non-ligand group. A number of non-ligand molecules have been conjugated to iRNAs in order to enhance the activity, cellular distribution or cellular uptake of the iRNA, and procedures for performing such conjugations are available in the scientific literature. Such non-ligand moieties have included lipid moieties, such as cholesterol (Kubo, T. et al., Biochem. Biophys. Res. Comm., 2007, 365(1):54-61; Letsinger et al., Proc. Natl. Acad Sci. USA, 1989, 86:6553), cholic acid (Manoharan et al., Bioorg. Med. Chem. Lett., 1994, 4:1053), a thioether, e.g., hexyl-S-tritylthiol (Manoharan et al., Ann. N.Y. Acad Sci., 1992, 660:306; Manoharan et al., Bioorg. Med Chem. Let., 1993, 3:2765), a thiocholesterol (Oberhauser et al., Nucl. Acids Res., 1992, 20:533), an aliphatic chain, e.g., dodecandiol or undecyl residues (Saison-Behmoaras et al., EMBO J., 1991, 10:111; Kabanov et al., FEBS Lett., 1990, 259:327; Svinarchuk et al., Biochimie, 1993, 75:49), a phospholipid, e.g., di-hexadecyl-rac-glycerol or triethylammonium 1,2-di-O-hexadecyl-rac-glycero-3-H-phosphonate (Manoharan et al., Tetrahedron Lett., 1995, 36:3651; Shea et al., Nucl. Acids Res., 1990, 18:3777), a polyamine or a polyethylene glycol chain (Manoharan et al., Nucleosides & Nucleotides, 1995, 14:969), or adamantane acetic acid (Manoharan et al., Tetrahedron Lett., 1995, 36:3651), a palmityl moiety (Mishra et al., Biochim. Biophys. Acta, 1995, 1264:229), or an octadecylamine or hexylamino-carbonyl-oxycholesterol moiety (Crooke et al., J. Pharmacol. Exp. Ther., 1996, 277:923). Representative United States patents that teach the preparation of such RNA conjugates have been listed above. Typical conjugation protocols involve the synthesis of an RNAs bearing an aminolinker at one or more positions of the sequence. The amino group is then reacted with the molecule being conjugated using appropriate coupling or activating reagents. The conjugation reaction may be performed either with the RNA still bound to the solid support or following cleavage of the RNA, in solution phase. Purification of the RNA conjugate by HPLC typically affords the pure conjugate.

### V. DELIVERY OF IRNA

[0477] The delivery of an iRNA to a subject in need thereof can be achieved in a number of different ways. li vivo delivery can be performed directly by administering a composition comprising an iRNA, e.g. a dsRNA, to a subject. Alternatively, delivery can be performed indirectly by administering one or more vectors that encode and direct the expression of the iRNA. These alternatives are discussed further below.

### A. Direct Delivery

[0478] In general, any method of delivering a nucleic acid molecule can be adapted for use with an iRNA (see e.g., Akhtar S. and Julian R L. (1992) Trends Cell. Biol. 2(5):139-144 and WO94/02595, which are incorporated herein by reference in their entireties). However, there are three factors that are important to consider in order to successfully deliver an iRNA molecule in vivo: (a) biological stability of the delivered molecule, (2) preventing non-specific effects, and (3) accumulation of the delivered molecule in the target tissue. The non-specific effects of an iRNA can be minimized by local administration, for example by direct injection or implantation into a tissue (as a non-limiting example, the eye) or topically administering the preparation. Local administration to a treatment site maximizes local concentration of the agent, limits the exposure of the agent to systemic tissues that may otherwise be harmed by the agent or that may degrade the agent, and permits a lower total dose of the iRNA molecule to be administered. Several studies have shown successful knockdown of gene products when an iRNA is administered locally. For example, intraocular delivery of a VEGF dsRNA by intravitreal injection in cynomolgus monkeys (Tolentino, MJ., et al (2004) Retina 24:132-138) and subretinal injections in mice (Reich, SJ., et al(2003) Mol. Vis. 9:210-216) were both shown to prevent neovascularization in an experimental model of age-related macular degeneration. In addition, direct intratumoral injection of a dsRNA in mice reduces tumor volume (Pille, J., et al (2005) Mol. Ther. 11:267-274) and can prolong survival of tumor-bearing mice (Kim, W J., et al (2006) Mol. Ther. 14:343-350; Li, S., et al (2007) Mol. Ther. 15:515-523). RNA interference has also shown success with local delivery to the CNS by direct injection (Dorn, G., et al. (2004) Nucleic Acids 32:e49; Tan, PH., et al (2005) Gene Ther. 12:59-66; Makimura, H., et al(2002) BMC Neurosci. 3:18; Shishkina, G T., et al (2004) Neuroscience 129:521-528; Thakker, ER., et al (2004) Proc. Natl. Acad Sci. U.S.A. 101:17270-17275; Akaneya, Y., et al (2005) J. Neurophysiol. 93:594-602) and to the lungs by intranasal administration (Howard, KA., et al (2006) Mol. Ther. 14:476-484; Zhang, X., et al (2004) J. Biol. Chem. 279:10677-10684; Bitko, V., et al (2005) Nat. Med. 11:50-55). For administering an iRNA systemically for the treatment of a disease, the RNA can be modified or alternatively delivered using a drug delivery system; both methods act to prevent the rapid degradation of the dsRNA by endo- and exo-nucleases in vivo.

[0479] Modification of the RNA or the pharmaceutical carrier can also permit targeting of the iRNA composition to the target tissue and avoid undesirable off-target effects. iRNA molecules can be modified by chemical conjugation to other groups, e.g., a lipid or carbohydrate group as described herein. Such conjugates can be used to target iRNA to particular cells, e.g., liver cells, e.g., hepatocytes. For example, GalNAc conjugates or lipid (e.g., LNP) formulations can be used to target iRNA to particular cells, e.g., liver cells, e.g., hepatocytes.

[0480] iRNA molecules can also be modified by chemical conjugation to lipophilic groups such as cholesterol to enhance cellular uptake and prevent degradation. For example, an iRNA directed against ApoB conjugated to a lipophilic cholesterol moiety was injected systemically into mice and resulted in knockdown of apoB mRNA in both the liver and jejunum (Soutschek, J., et al (2004) Nature 432:173-178). Conjugation of an iRNA to an aptamer has been shown to inhibit tumor growth and mediate tumor regression in a mouse model of prostate cancer (McNamara, J O., et al (2006) Nat. Biotechnol. 24:1005-1015). In an alternative embodiment, the iRNA can be delivered using drug delivery systems such as a nanoparticle, a dendrimer, a polymer, liposomes, or a cationic delivery system. Positively charged cationic delivery systems facilitate binding of an iRNA molecule (negatively charged) and also enhance interactions at the negatively charged cell membrane to permit efficient uptake of an iRNA by the cell. Cationic lipids, dendrimers, or polymers can either be bound to an iRNA, or induced to form a vesicle or micelle (see e.g., Kim S H., et al (2008) Journal of Controlled Release 129(2):107-116) that encases an iRNA. The formation of vesicles or micelles further prevents degradation of the iRNA when administered systemically. Methods for making and administering cationic- iRNA complexes are well within the abilities of one skilled in the art (see e.g., Sorensen, D R., et al (2003) J. Mol. Biol 327:761-766; Verma, U N., et al (2003) Clin. Cancer Res. 9:1291-1300; Arnold, A S et al (2007) J. Hypertens. 25:197-205, which are incorporated herein by reference in their entirety). Some non-limiting examples of drug delivery systems useful for systemic delivery of iRNAs include DOTAP (Sorensen, D R., et al (2003), supra; Verma, U N., et al (2003), supra), Oligofectamine, “solid nucleic acid lipid particles” (Zimmermann, T S., et al (2006) Nature 441:111-114), cardiolipin (Chien, P Y., et al (2005) Cancer Gene Ther. 12:321-328: Pal, A., et al (2005) Int J. Oncol. 26:1087-1091), polyethyleneimine (Bonnet M E., et al (2008) Pharm. Res. August 16 Epub ahead of print; Aigner, A. (2006) J. Biomed. Biotechnol. 71659), Arg-Gly-Asp (RGD) peptides (Liu, S. (2006) Mol. Pharm. 3:472-487), and polyamidoamines (Tomalia, D A., et al (2007) Biochem. Soc. Trans. 35:61-67; Yoo, H., et al (1999) Pharm. Res. 16:1799-1804). In some embodiments, an iRNA forms a complex with cyclodextrin for systemic administration. Methods for administration and pharmaceutical compositions of iRNAs and cyclodextrins can be found in U.S. Pat. No. 7,427,605, which is herein incorporated by reference in its entirety.

B. Vector Encoded iRNAs

[0481] In another aspect, iRNA targeting MYOC can be expressed from transcription units inserted into DNA or RNA vectors (see, e.g., Couture, A, et al., TIG. (1996), 12:5-10; Skillern, A., et al., International PCT Publication No. WO 00/22113, Conrad, International PCT Publication No. WO 00/22114, and Conrad, U.S. Pat. No. 6,054,299). Expression can be transient (on the order of hours to weeks) or sustained (weeks to months or longer), depending upon the specific construct used and the target tissue or cell type. These transgenes can be introduced as a linear construct, a circular plasmid, or a viral vector, which can be an integrating or non-integrating vector. The transgene can also be constructed to permit it to be inherited as an extrachromosomal plasmid (Gassmann, et al., Proc. Natl. Acad. Sci. USA (1995) 92:1292).

[0482] The individual strand or strands of an iRNA can be transcribed from a promoter on an expression vector. Where two separate strands are to be expressed to generate, for example, a dsRNA, two separate expression vectors can be co-introduced (e.g., by transfection or infection) into a target cell. Alternatively, each individual strand of a dsRNA can be transcribed by promoters both of which are located on the same expression plasmid. In some embodiments, a dsRNA is expressed as an inverted repeat joined by a linker polynucleotide sequence such that the dsRNA has a stem and loop structure.

[0483] An iRNA expression vector is typically a DNA plasmid or viral vector. An expression vector compatible with eukaryotic cells, e.g., with vertebrate cells, can be used to produce recombinant constructs for the expression of an iRNA as described herein. Eukaryotic cell expression vectors are well known in the art and are available from a number of commercial sources. Typically, such vectors contain convenient restriction sites for insertion of the desired nucleic acid segment. Delivery of iRNA expressing vectors can be systemic, such as by intravenous or intramuscular administration, by administration to target cells ex-planted from the patient followed by reintroduction into the patient, or by any other means that allows for introduction into a desired target cell.

[0484] An iRNA expression plasmid can be transfected into a target cell as a complex with a cationic lipid carrier (e.g., Oligofectamine) or a non-cationic lipid-based carrier (e.g., Transit-TKO™). Multiple lipid transfections for iRNA-mediated knockdowns targeting different regions of a target RNA over a period of a week or more are also contemplated by the disclosure. Successful introduction of vectors into host cells can be monitored using various known methods. For example, transient transfection can be signaled with a reporter, such as a fluorescent marker, such as Green Fluorescent Protein (GFP). Stable transfection of cells ex vivo can be ensured using markers that provide the transfected cell with resistance to specific environmental factors (e.g., antibiotics and drugs), such as hygromycin B resistance.

[0485] Viral vector systems which can be utilized with the methods and compositions described herein include, but are not limited to, (a) adenovirus vectors; (b) retrovirus vectors, including but not limited to lentiviral vectors, moloney murine leukemia virus, etc.; (c) adeno- associated virus vectors; (d) herpes simplex virus vectors; (e) SV40 vectors; (f) polyoma virus vectors; (g) papilloma virus vectors; (h) picornavirus vectors; (i) pox virus vectors such as an orthopox, e.g., vaccinia virus vectors or avipox, e.g. canary pox or fowl pox; and (j) a helper-dependent or gutless adenovirus. Replication-defective viruses can also be advantageous. Different vectors will or will not become incorporated into the cells' genome. The constructs can include viral sequences for transfection, if desired. Alternatively, the construct may be incorporated into vectors capable of episomal replication, e.g EPV and EBV vectors. Constructs for the recombinant expression of an iRNA will generally require regulatory elements, e.g., promoters, enhancers, etc., to ensure the expression of the iRNA in target cells. Other aspects to consider for vectors and constructs are further described below.

[0486] Vectors useful for the delivery of an iRNA will include regulatory elements (promoter, enhancer, etc.) sufficient for expression of the iRNA in the desired target cell or tissue. The regulatory elements can be chosen to provide either constitutive or regulated/inducible expression.

[0487] Expression of the iRNA can be precisely regulated, for example, by using an inducible regulatory sequence that is sensitive to certain physiological regulators, e.g., circulating glucose levels, or hormones (Docherty et al., 1994, FASEB J. 8:20-24). Such inducible expression systems, suitable for the control of dsRNA expression in cells or in mammals include, for example, regulation by ecdysone, by estrogen, progesterone, tetracycline, chemical inducers of dimerization, and isopropyl-β-D1-thiogalactopyranoside (IPTG). A person skilled in the art would be able to choose the appropriate regulatory/promoter sequence based on the intended use of the iRNA transgene.

[0488] In a specific embodiment, viral vectors that contain nucleic acid sequences encoding an iRNA can be used. For example, a retroviral vector can be used (see Miller et al., Meth. Enzymol. 217:581-599 (1993)). These retroviral vectors contain the components necessary for the correct packaging of the viral genome and integration into the host cell DNA. The nucleic acid sequences encoding an iRNA are cloned into one or more vectors, which facilitates delivery of the nucleic acid into a patient. More detail about retroviral vectors can be found, for example, in Boesen et al., Biotherapy 6:291-302 (1994), which describes the use of a retroviral vector to deliver the mdr1 gene to hematopoietic stem cells in order to make the stem cells more resistant to chemotherapy. Other references illustrating the use of retroviral vectors in gene therapy are: Clowes et al., J. Clin. Invest. 93:644-651 (1994); Kiem et al., Blood 83:1467-1473 (1994); Salmons and Gunzberg, Human Gene Therapy 4:129-141 (1993); and Grossman and Wilson, Curr. Opin. in Genetics and Devel. 3:110-114 (1993). Lentiviral vectors contemplated for use include, for example, the HIV based vectors described in U.S. Pat. Nos. 6,143,520; 5,665,557; and 5,981,276, which are herein incorporated by reference.

[0489] Adenoviruses are also contemplated for use in delivery of iRNAs. Adenoviruses are especially attractive vehicles, e.g., for delivering genes to respiratory epithelia. Adenoviruses naturally infect respiratory epithelia where they cause a mild disease. Other targets for adenovirus-based delivery systems are liver, the central nervous system, endothelial cells, and muscle. Adenoviruses have the advantage of being capable of infecting non-dividing cells. Kozarsky and Wilson, Current Opinion in Genetics and Development 3.499-503 (1993) present a review of adenovirus-based gene therapy. Bout et al., Human Gene Therapy 5:3-10 (1994) demonstrated the use of adenovirus vectors to transfer genes to the respiratory epithelia of rhesus monkeys. Other instances of the use of adenoviruses in gene therapy can be found in Rosenfeld et al., Science 252:431-434 (1991): Rosenfeld et al., Cell 68:143-155 (1992); Mastrangeli et al., J. Clin. Invest. 91:225-234 (1993); PCT Publication WO94/12649; and Wang, et al., Gene Therapy 2:775-783 (1995). A suitable AV vector for expressing an iRNA featured in the disclosure, a method for constructing the recombinant AV vector, and a method for delivering the vector into target cells, are described in Xia H et al. (2002), Nat. Biotech. 20: 1006-1010.

[0490] Use of Adeno-associated virus (AAV) vectors is also contemplated (Walsh et al., Proc. Soc. Exp. Biol. Med. 204:289-300 (1993); U.S. Pat. No. 5,436,146). In some embodiments, the iRNA can be expressed as two separate, complementary single-stranded RNA molecules from a recombinant AAV vector having, for example, either the U6 or H1 RNA promoters, or the cytomegalovirus (CMV) promoter. Suitable AAV vectors for expressing the dsRNA featured in the disclosure, methods for constructing the recombinant AV vector, and methods for delivering the vectors into target cells are described in Samulski R et al. (1987), J. Virol. 61. 3096-3101; Fisher K J et al. (1996), J. Virol., 70: 520-532; Samulski R et al. (1989), J. Virol. 63: 3822-3826; U.S. Pat. Nos. 5,252,479; 5,139,941; International Patent Application No. WO 94/13788; and International Patent Application No. WO 93/24641, the entire disclosures of which are herein incorporated by reference.

[0491] Another typical viral vector is a pox virus such as a vaccinia virus, for example an attenuated vaccinia such as Modified Virus Ankara (MVA) or NYVAC, an avipox such as fowl pox or canary pox.

[0492] The tropism of viral vectors can be modified by pseudotyping the vectors with envelope proteins or other surface antigens from other viruses, or by substituting different viral capsid proteins, as appropriate. For example, lentiviral vectors can be pseudotyped with surface proteins from vesicular stomatitis virus (VSV), rabies, Ebola, Mokola, and the like. AAV vectors can be made to target different cells by engineering the vectors to express different capsid protein serotypes; see, e.g., Rabinowitz J E et al. (2002), J Virol 76:791-801, the entire disclosure of which is herein incorporated by reference.

[0493] The pharmaceutical preparation of a vector can include the vector in an acceptable diluent, or can include a slow release matrix in which the gene delivery vehicle is imbedded. Alternatively, where the complete gene delivery vector can be produced intact from recombinant cells, e.g., retroviral vectors, the pharmaceutical preparation can include one or more cells which produce the gene delivery system.

### VI. PHARMACEUTICAL COMPOSITIONS CONTAINING IRNA

[0494] In some embodiments, the disclosure provides pharmaceutical compositions containing an iRNA, as described herein, and a pharmaceutically acceptable carrier. The pharmaceutical composition containing the iRNA is useful for treating a disease or disorder related to the expression or activity of MYOC (e.g., glaucoma, e.g., primary open angle glaucoma (POAG)). Such pharmaceutical compositions are formulated based on the mode of delivery. In some embodiments, compositions can be formulated for localized delivery, e.g., by intraocular delivery (e.g., intravitreal administration, e.g., intravitreal injection; transscleral administration, e.g., transscleral injection; subconjunctival administration, e.g., subconjunctival injection; retrobulbar administration, e.g., retrobulbar injection; intracameral administration, e.g., intracameral injection; or subretinal administration, e.g., subretinal injection). In other embodiments, compositions can be formulated for topical delivery. In another example, compositions can be formulated for systemic administration via parenteral delivery, e.g., by intravenous (IV) delivery. In some embodiments, a composition provided herein (e.g., a composition comprising a GalNAc conjugate or an LNP formulation) is formulated for intravenous delivery.

[0495] The pharmaceutical compositions featured herein are administered in a dosage sufficient to inhibit expression of MYOC. In general, a suitable dose of iRNA will be in the range of 0.01 to 200.0 milligrams per kilogram body weight of the recipient per day. The pharmaceutical composition may be administered once daily, or the iRNA may be administered as two, three, or more sub-doses at appropriate intervals throughout the day or even using continuous infusion or delivery through a controlled release formulation. In that case, the iRNA contained in each sub-dose must be correspondingly smaller in order to achieve the total daily dosage. The dosage unit can also be compounded for delivery over several days, e.g., using a conventional sustained release formulation which provides sustained release of the iRNA over a several day period. Sustained release formulations are well known in the art and are particularly useful for delivery of agents at a particular site, such as can be used with the agents of the present disclosure. In this embodiment, the dosage unit contains a corresponding multiple of the daily dose.

[0496] The effect of a single dose on MYOC levels can be long lasting, such that subsequent doses are administered at not more than 3, 4, or 5-day intervals, or at not more than 1, 2, 3, 4, 12, 24, or 36-week intervals.

[0497] The skilled artisan will appreciate that certain factors may influence the dosage and timing required to effectively treat a subject, including but not limited to the severity of the disease or disorder, previous treatments, the general health and/or age of the subject, and other diseases present. Moreover, treatment of a subject with a therapeutically effective amount of a composition can include a single treatment or a series of treatments. Estimates of effective dosages and in vivo half-lives for the individual iRNAs encompassed by the disclosure can be made using conventional methodologies or on the basis of in vivo testing using a suitable animal model.

[0498] A suitable animal model, e.g., a mouse or a cynomolgus monkey, e.g., an animal containing a transgene expressing human MYOC, can be used to determine the therapeutically effective dose and/or an effective dosage regimen administration of MYOC siRNA.

[0499] The present disclosure also includes pharmaceutical compositions and formulations that include the iRNA compounds featured herein. The pharmaceutical compositions of the present disclosure may be administered in a number of ways depending upon whether local or systemic treatment is desired and upon the area to be treated. Administration may be local (e.g., by intraocular injection), topical (e.g., by an eye drop solution), or parenteral. Parenteral administration includes intravenous, intraarterial, subcutaneous, intraperitoneal or intramuscular injection or infusion; subdermal, e.g., via an implanted device; or intracranial, e.g., by intraparenchymal, intrathecal, or intraventricular administration.

[0500] Pharmaceutical compositions and formulations for topical administration may include transdermal patches, ointments, lotions, creams, gels, drops, suppositories, sprays, liquids and powders. Conventional pharmaceutical carriers, aqueous, powder or oily bases, thickeners and the like may be necessary or desirable. Coated condoms, gloves and the like may also be useful. Suitable topical formulations include those in which the iRNAs featured in the disclosure are in admixture with a topical delivery agent such as lipids, liposomes, fatty acids, fatty acid esters, steroids, chelating agents and surfactants. Suitable lipids and liposomes include neutral (e.g., dioleoylphosphatidyl DOPE ethanolamine, dimyristoylphosphatidyl choline DMPC, distearolyphosphatidyl choline) negative (e.g., dimyristoylphosphatidyl glycerol DMPG) and cationic (e.g., dioleoyltetramethylaminopropyl DOTAP and dioleoylphosphatidyl ethanolamine DOTMA). iRNAs featured in the disclosure may be encapsulated within liposomes or may form complexes thereto, in particular to cationic liposomes. Alternatively, iRNAs may be complexed to lipids, in particular to cationic lipids. Suitable fatty acids and esters include but are not limited to arachidonic acid, oleic acid, eicosanoic acid, lauric acid, caprylic acid, capric acid, myristic acid, palmitic acid, stearic acid, linoleic acid, linolenic acid, dicaprate, tricaprate, monoolein, dilaurin, glyceryl 1-monocaprate, 1-dodecylazacycloheptan-2-one, an acylcarnitine, an acylcholine, or a C₁₋₂₀ alkyl ester (e.g., isopropylmyristate IPM), monoglyceride, diglyceride or pharmaceutically acceptable salt thereof. Topical formulations are described in detail in U.S. Pat. No. 6,747,014, which is incorporated herein by reference.

### A. Liposomal Formulations

[0501] There are many organized surfactant structures besides microemulsions that have been studied and used for the formulation of drugs. These include monolayers, micelles, bilayers and vesicles. Vesicles, such as liposomes, have attracted great interest because of their specificity and the duration of action they offer from the standpoint of drug delivery. As used in the present disclosure, the term “liposome” means a vesicle composed of amphiphilic lipids arranged in a spherical bilayer or bilayers.

[0502] Liposomes are unilamellar or multilamellar vesicles which have a membrane formed from a lipophilic material and an aqueous interior. The aqueous portion contains the composition to be delivered. Cationic liposomes possess the advantage of being able to fuse to the cell wall. Non-cationic liposomes, although not able to fuse as efficiently with the cell wall, are taken up by macrophages in vivo.

[0503] In order to traverse intact mammalian skin, lipid vesicles must pass through a series of fine pores, each with a diameter less than 50 nm, under the influence of a suitable transdermal gradient. Therefore, it is desirable to use a liposome which is highly deformable and able to pass through such fine pores.

[0504] Further advantages of liposomes include; liposomes obtained from natural phospholipids are biocompatible and biodegradable; liposomes can incorporate a wide range of water and lipid soluble drugs; liposomes can protect encapsulated drugs in their internal compartments from metabolism and degradation (Rosoff, in Pharmaceutical Dosage Forms, Lieberman, Rieger and Banker (Eds.), 1988, Marcel Dekker, Inc., New York, N.Y., volume 1, p. 245). Important considerations in the preparation of liposome formulations are the lipid surface charge, vesicle size and the aqueous volume of the liposomes.

[0505] Liposomes are useful for the transfer and delivery of active ingredients to the site of action. Because the liposomal membrane is structurally similar to biological membranes, when liposomes are applied to a tissue, the liposomes start to merge with the cellular membranes and as the merging of the liposome and cell progresses, the liposomal contents are emptied into the cell where the active agent may act.

[0506] Liposomal formulations have been the focus of extensive investigation as the mode of delivery for many drugs. There is growing evidence that for topical administration, liposomes present several advantages over other formulations. Such advantages include reduced side-effects related to high systemic absorption of the administered drug, increased accumulation of the administered drug at the desired target, and the ability to administer a wide variety of drugs, both hydrophilic and hydrophobic, into the skin.

[0507] Several reports have detailed the ability of liposomes to deliver agents including high-molecular weight DNA into the skin. Compounds including analgesics, antibodies, hormones and high-molecular weight DNAs have been administered to the skin. The majority of applications resulted in the targeting of the upper epidermis

[0508] Liposomes fall into two broad classes. Cationic liposomes are positively charged liposomes which interact with the negatively charged DNA molecules to form a stable complex. The positively charged DNA/liposome complex binds to the negatively charged cell surface and is internalized in an endosome. Due to the acidic pH within the endosome, the liposomes are ruptured, releasing their contents into the cell cytoplasm (Wang et al., Biochem. Biophys. Res. Commun., 1987, 147, 980-985).

[0509] Liposomes which are pH-sensitive or negatively charged, entrap DNA rather than complex with it. Since both the DNA and the lipid are similarly charged, repulsion rather than complex formation occurs. Nevertheless, some DNA is entrapped within the aqueous interior of these liposomes. pH-sensitive liposomes have been used to deliver DNA encoding the thymidine kinase gene to cell monolayers in culture. Expression of the exogenous gene was detected in the target cells (Zhou et al., Journal of Controlled Release, 1992, 19, 269-274).

[0510] One major type of liposomal composition includes phospholipids other than naturally derived phosphatidylcholine. Neutral liposome compositions, for example, can be formed from dimyristoyl phosphatidylcholine (DMPC) or dipalmitoyl phosphatidylcholine (DPPC). Anionic liposome compositions generally are formed from dimyristoyl phosphatidylglycerol, while anionic fusogenic liposomes are formed primarily from dioleoyl phosphatidylethanolamine (DOPE). Another type of liposomal composition is formed from phosphatidylcholine (PC) such as, for example, soybean PC, and egg PC. Another type is formed from mixtures of phospholipid and/or phosphatidylcholine and/or cholesterol.

[0511] Several studies have assessed the topical delivery of liposomal drug formulations to the skin. Application of liposomes containing interferon to guinea pig skin resulted in a reduction of skin herpes sores while delivery of interferon via other means (e.g., as a solution or as an emulsion) were ineffective (Weiner et al., Journal of Drug Targeting, 1992, 2, 405-410). Further, an additional study tested the efficacy of interferon administered as part of a liposomal formulation to the administration of interferon using an aqueous system, and concluded that the liposomal formulation was superior to aqueous administration (du Plessis et al., Antiviral Research, 1992, 18, 259-265).

[0512] Non-ionic liposomal systems have also been examined to determine their utility in the delivery of drugs to the skin, in particular systems comprising non-ionic surfactant and cholesterol. Non-ionic liposomal formulations comprising Novasome™ I (glyceryl dilaurate/cholesterol/polyoxyethylene-10-stearyl ether) and Novasome™ II (glyceryl distearate/cholesterol/polyoxyethylene-10-stearyl ether) were used to deliver cyclosporin-A into the dermis of mouse skin. Results indicated that such non-ionic liposomal systems were effective in facilitating the deposition of cyclosporin-A into different layers of the skin (Hu et al. S.T.P. Pharma. Sci., 1994, 4, 6, 466).

[0513] Liposomes also include “sterically stabilized” liposomes, a term which, as used herein, refers to liposomes comprising one or more specialized lipids that, when incorporated into liposomes, result in enhanced circulation lifetimes relative to liposomes lacking such specialized lipids. Examples of sterically stabilized liposomes are those in which part of the vesicle-forming lipid portion of the liposome (A) comprises one or more glycolipids, such as monosialoganglioside G_{M1}, or (B) is derivatized with one or more hydrophilic polymers, such as a polyethylene glycol (PEG) moiety. While not wishing to be bound by any particular theory, it is thought in the art that, at least for sterically stabilized liposomes containing gangliosides, sphingomyelin, or PEG-derivatized lipids, the enhanced circulation half-life of these sterically stabilized liposomes derives from a reduced uptake into cells of the reticuloendothelial system (RES) (Allen et al., FEBS Letters, 1987, 223, 42; Wu et al., Cancer Research, 1993, 53, 3765).

[0514] Various liposomes comprising one or more glycolipids are known in the art. Papahadjopoulos et al. (Ann. N.Y. Acad. Sci., 1987, 507, 64) reported the ability of monosialoganglioside G_{M1}, galactocerebroside sulfate and phosphatidylinositol to improve blood half-lives of liposomes. These findings were expounded upon by Gabizon et al. (Proc. Natl. Acad. Sci. U.S.A., 1988, 85, 6949). U.S. Pat. No. 4,837,028 and WO 88/04924, both to Allen et al., disclose liposomes comprising (1) sphingomyelin and (2) the ganglioside G_{M1} or a galactocerebroside sulfate ester. U.S. Pat. No. 5,543,152 (Webb et al.) discloses liposomes comprising sphingomyelin. Liposomes comprising 1,2-sn-dimyristoylphosphatidylcholine are disclosed in WO 97/13499 (Lim et al).

[0515] Many liposomes comprising lipids derivatized with one or more hydrophilic polymers, and methods of preparation thereof, are known in the art. Sunamoto et al. (Bull. Chem. Soc. Jpn., 1980, 53, 2778) described liposomes comprising a nonionic detergent, 2C_{1215G}, that contains a PEG moiety. Ilium et al. (FEBS Lett., 1984, 167, 79) noted that hydrophilic coating of polystyrene particles with polymeric glycols results in significantly enhanced blood half-lives. Synthetic phospholipids modified by the attachment of carboxylic groups of polyalkylene glycols (e.g., PEG) are described by Sears (U.S. Pat. Nos. 4,426,330 and 4,534,899). Klibanov et al. (FEBS Lett., 1990, 268, 235) described experiments demonstrating that liposomes comprising phosphatidylethanolamine (PE) derivatized with PEG or PEG stearate have significant increases in blood circulation half-lives. Blume et al. (Biochimica et Biophysica Aca, 1990, 1029, 91) extended such observations to other PEG-derivatized phospholipids, e.g., DSPE-PEG, formed from the combination of distearoylphosphatidylethanolamine (DSPE) and PEG. Liposomes having covalently bound PEG moieties on their external surface are described in European Patent No. EP 0 445 131 B1 and WO 90/04384 to Fisher. Liposome compositions containing 1-20 mole percent of PE derivatized with PEG, and methods of use thereof, are described by Woodle et al. (U.S. Pat. Nos. 5,013,556 and 5,356,633) and Martin et al. (U.S. Pat. No. 5,213,804 and European Patent No. EP 0 496 813 B1). Liposomes comprising a number of other lipid-polymer conjugates are disclosed in WO 91/05545 and U.S. Pat. No. 5,225,212 (both to Martin et al.) and in WO 94/20073 (Zalipsky et al.). Liposomes comprising PEG-modified ceramide lipids are described in WO 96/10391 (Choi et al). U.S. Pat. No. 5,540,935 (Miyazaki et al.) and U.S. Pat. No. 5,556,948 (Tagawa et al.) describe PEG-containing liposomes that can be further derivatized with functional moieties on their surfaces.

[0516] A number of liposomes comprising nucleic acids are known in the art. WO 96/40062 to Thierry et al. discloses methods for encapsulating high molecular weight nucleic acids in liposomes. U.S. Pat. No. 5,264,221 to Tagawa et al. discloses protein-bonded liposomes and asserts that the contents of such liposomes may include a dsRNA. U.S. Pat. No. 5,665,710 to Rahman et al. describes certain methods of encapsulating oligodeoxynucleotides in liposomes. WO 97/04787 to Love et al. discloses liposomes comprising dsRNAs targeted to the raf gene.

[0517] Transfersomes are yet another type of liposomes, and are highly deformable lipid aggregates which are attractive candidates for drug delivery vehicles. Transfersomes may be described as lipid droplets which are so highly deformable that they are easily able to penetrate through pores which are smaller than the droplet. Transfersomes are adaptable to the environment in which they are used, e.g., they are self-optimizing (adaptive to the shape of pores in the skin), self-repairing, frequently reach their targets without fragmenting, and often self-loading. To make transfersomes it is possible to add surface edge-activators, usually surfactants, to a standard liposomal composition. Transfersomes have been used to deliver serum albumin to the skin. The transfersome-mediated delivery of serum albumin has been shown to be as effective as subcutaneous injection of a solution containing serum albumin.

[0518] Surfactants find wide application in formulations such as emulsions (including microemulsions) and liposomes. The most common way of classifying and ranking the properties of the many different types of surfactants, both natural and synthetic, is by the use of the hydrophile/lipophile balance (HLB). The nature of the hydrophilic group (also known as the “head”) provides the most useful means for categorizing the different surfactants used in formulations (Rieger, in Pharmaceutical Dosage Forms, Marcel Dekker, Inc., New York, N.Y., 1988, p. 285).

[0519] If the surfactant molecule is not ionized, it is classified as a nonionic surfactant. Nonionic surfactants find wide application in pharmaceutical and cosmetic products and are usable over a wide range of pH values. In general, their HLB values range from 2 to about 18 depending on their structure. Nonionic surfactants include nonionic esters such as ethylene glycol esters, propylene glycol esters, glyceryl esters, polyglyceryl esters, sorbitan esters, sucrose esters, and ethoxylated esters. Nonionic alkanolamides and ethers such as fatty alcohol ethoxylates, propoxylated alcohols, and ethoxylated/propoxylated block polymers are also included in this class. The polyoxyethylene surfactants are the most popular members of the nonionic surfactant class.

[0520] If the surfactant molecule carries a negative charge when it is dissolved or dispersed in water, the surfactant is classified as anionic. Anionic surfactants include carboxylates such as soaps, acyl lactylates, acyl amides of amino acids, esters of sulfuric acid such as alkyl sulfates and ethoxylated alkyl sulfates, sulfonates such as alkyl benzene sulfonates, acyl isethionates, acyl taurates and sulfosuccinates, and phosphates. The most important members of the anionic surfactant class are the alkyl sulfates and the soaps.

[0521] If the surfactant molecule carries a positive charge when it is dissolved or dispersed in water, the surfactant is classified as cationic. Cationic surfactants include quaternary ammonium salts and ethoxylated amines. The quaternary ammonium salts are the most used members of this class.

[0522] If the surfactant molecule has the ability to carry either a positive or negative charge, the surfactant is classified as amphoteric. Amphoteric surfactants include acrylic acid derivatives, substituted alkylamides, N-alkylbetaines and phosphatides.

[0523] The use of surfactants in drug products, formulations and in emulsions has been reviewed (Rieger, in Pharmaceutical Dosage Forms, Marcel Dekker, Inc., New York, N.Y., 1988, p. 285).

### B. Nucleic Acid Lipid Particles

[0524] In some embodiments, a MYOC dsRNA featured in the disclosure is fully encapsulated in the lipid formulation, e.g., to form a SPLP, pSPLP, SNALP, or other nucleic acid-lipid particle. SNALPs and SPLPs typically contain a cationic lipid, a non-cationic lipid, and a lipid that prevents aggregation of the particle (e.g., a PEG-lipid conjugate). SNALPs and SPLPs are extremely useful for systemic applications, as they exhibit extended circulation lifetimes following intravenous (i.v.) injection and accumulate at distal sites (e.g., sites physically separated from the administration site). SPLPs include “pSPLP,” which include an encapsulated condensing agent-nucleic acid complex as set forth in PCT Publication No. WO 00/03683. The particles of the present disclosure typically have a mean diameter of about 50 nm to about 150 nm, more typically about 60 nm to about 130 nm, more typically about 70 nm to about 110 nm, most typically about 70 nm to about 90 nm, and are substantially nontoxic. In addition, the nucleic acids when present in the nucleic acid- lipid particles of the present disclosure are resistant in aqueous solution to degradation with a nuclease. Nucleic acid-lipid particles and their method of preparation are disclosed in, e.g., U.S. Pat. Nos. 5,976,567; 5,981,501; 6,534,484; 6,586,410; 6,815,432; and PCT Publication No. WO 96/40964.

[0525] In some embodiments, the lipid to drug ratio (mass/mass ratio) (e.g., lipid to dsRNA ratio) will be in the range of from about 1:1 to about 50:1, from about 1:1 to about 25:1, from about 3:1 to about 15:1, from about 4:1 to about 10:1, from about 5:1 to about 9:1, or about 6:1 to about 9:1.

[0526] The cationic lipid may be, for example, N,N-dioleyl-N,N-dimethylammonium chloride (DODAC), N,N-distearyl-N,N-dimethylammonium bromide (DDAB), N—(I-(2,3-dioleoyloxy)propyl)-N,N,N-trimethylammonium chloride (DOTAP), N—(I-(2,3-dioleyloxy)propyl)-N,N,N-trimethylammonium chloride (DOTMA), N,N-dimethyl-2,3-dioleyloxy)propylamine (DODMA), 1,2-DiLinoleyloxy-N,N-dimethylaminopropane (DLinDMA), 1,2-Dilinolenyloxy-N,N-dimethylaminopropane (DLenDMA), 1,2-Dilinoleylcarbamoyloxy-3-dimethylaminopropane (DLin-C-DAP), 1,2-Dilinoleyoxy-3-(dimethylamino)acetoxypropane (DLin-DAC), 1,2-Dilinoleyoxy-3-morpholinopropane (DLin-MA), 1,2-Dilinoleoyl-3-dimethylaminopropane (DLinDAP), 1,2-Dilinoleylthio-3-dimethylaminopropane (DLin-S-DMA), 1-Linoleoyl-2-linoleyloxy-3-dimethylaminopropane (DLin-2-DMAP), 1,2-Dilinoleyloxy-3-trimethylaminopropane chloride salt (DLin-TMA.Cl), 1,2-Dilinoleoyl-3-trimethylaminopropane chloride salt (DLin-TAP.Cl), 1,2-Dilinoleyloxy-3-(N-methylpiperazino)propane (DLin-MPZ), or 3-(N,N-Dilinoleylamino)-1,2-propanediol (DLinAP), 3-(N,N-Dioleylamino)-1,2-propanedio (DOAP), 1,2-Dilinoleyloxo-3-(2-N,N-dimethylamino)ethoxypropane (DLin-EG-DMA), 1,2-Dilinolenyloxy-N,N-dimethylaminopropane (DLinDMA), 2,2-Dilinoleyl-4-dimethylaminomethyl-[1,3]-dioxolane (DLin-K-DMA) or analogs thereof, (3aR,5s,6aS)-N,N-dimethyl-2,2-di((9Z,12Z)-octadeca-9,12-dienyl)tetrahydro-3aH-cyclopenta[d][1,3]dioxol-5-amine (ALN100), (6Z,9Z,28Z,31Z)-heptatriaconta-6,9,28,31-tetraen-19-yl 4-(dimethylamino)butanoate (MC3), 1,1′-(2-(4-(2-((2-(bis(2-hydroxydodecyl)amino)ethyl)(2-hydroxydodecyl)amino)ethyl)piperazin-1-yl)ethylazanediyl)didodecan-2-ol (Tech G1), or a mixture thereof. The cationic lipid may comprise from about 20 mol % to about 50 mol % or about 40 mol % of the total lipid present in the particle.

[0527] In some embodiments, the compound 2,2-Dilinoleyl-4-dimethylaminoethyl-[1,3]-dioxolane can be used to prepare lipid-siRNA nanoparticles. Synthesis of 2,2-Dilinoleyl-4-dimethylaminoethyl-[1,3]-dioxolane is described in U.S. provisional patent application No. 61/107,998 filed on Oct. 23, 2008, which is herein incorporated by reference.

[0528] In some embodiments, the lipid-siRNA particle includes 40% 2,2-Dilinoleyl-4-dimethylaminoethyl-[1,3]-dioxolane: 10% DSPC: 40% Cholesterol: 10% PEG-C-DOMG (mole percent) with a particle size of 63.0±20 nm and a 0.027 siRNA/Lipid Ratio.

[0529] The non-cationic lipid may be an anionic lipid or a neutral lipid including, but not limited to, distearoylphosphatidylcholine (DSPC), dioleoylphosphatidylcholine (DOPC), dipalmitoylphosphatidylcholine (DPPC), dioleoylphosphatidylglycerol (DOPG), dipalmitoylphosphatidylglycerol (DPPG), dioleoyl-phosphatidylethanolamine (DOPE), palmitoyloleoylphosphatidylcholine (POPC), palmitoyloleoylphosphatidylethanolamine (POPE), dioleoyl- phosphatidylethanolamine 4-(N-maleimidomethyl)-cyclohexane-1-carboxylate (DOPE-mal), dipalmitoyl phosphatidyl ethanolamine (DPPE), dimyristoylphosphoethanolamine (DMPE), distearoyl-phosphatidyl-ethanolamine (DSPE), 16-O-monomethyl PE, 16-O-dimethyl PE, 18-1-trans PE, 1-stearoyl-2-oleoyl- phosphatidyethanolamine (SOPE), cholesterol, or a mixture thereof. The non-cationic lipid may be from about 5 mol % to about 90 mol %, about 10 mol %, or about 58 mol % if cholesterol is included, of the total lipid present in the particle.

[0530] The conjugated lipid that inhibits aggregation of particles may be, for example, a polyethyleneglycol (PEG)-lipid including, without limitation, a PEG-diacylglycerol (DAG), a PEG-dialkyloxypropyl (DAA), a PEG-phospholipid, a PEG-ceramide (Cer), or a mixture thereof. The PEG-DAA conjugate may be, for example, a PEG-dilauryloxypropyl (Ci₂), a PEG-dimyristyloxypropyl (Ci₄), a PEG-dipalmityloxypropyl (Ci₆), or a PEG- distearyloxypropyl (C]₈). The conjugated lipid that prevents aggregation of particles may be from 0 mol % to about mol % or about 2 mol % of the total lipid present in the particle.

[0531] In some embodiments, the nucleic acid-lipid particle further includes cholesterol at, e.g., about 10 mol % to about 60 mol % or about 48 mol % of the total lipid present in the particle.

[0532] In some embodiments, the iRNA is formulated in a lipid nanoparticle (LNP).

### LNP01

[0533] In some embodiments, the lipidoid ND98·4HCl (MW 1487) (see U.S. patent application Ser. No. 12/056,230, filed Mar. 26, 2008, which is herein incorporated by reference), Cholesterol (Sigma-Aldrich), and PEG-Ceramide C16 (Avanti Polar Lipids) can be used to prepare lipid-dsRNA nanoparticles (e.g., LNP01 particles). Stock solutions of each in ethanol can be prepared as follows: ND98, 133 mg/ml; Cholesterol, 25 mg/ml, PEG-Ceramide C16, 100 mg/ml. The ND98, Cholesterol, and PEG-Ceramide C16 stock solutions can then be combined in a, e.g., 42:48:10 molar ratio. The combined lipid solution can be mixed with aqueous dsRNA (e.g., in sodium acetate pH 5) such that the final ethanol concentration is about 35-45% and the final sodium acetate concentration is about 100-300 mM. Lipid-dsRNA nanoparticles typically form spontaneously upon mixing. Depending on the desired particle size distribution, the resultant nanoparticle mixture can be extruded through a polycarbonate membrane (e.g., 100 nm cut-off) using, for example, a thermobarrel extruder, such as Lipex Extruder (Northern Lipids, Inc). In some cases, the extrusion step can be omitted. Ethanol removal and simultaneous buffer exchange can be accomplished by, for example, dialysis or tangential flow filtration. Buffer can be exchanged with, for example, phosphate buffered saline (PBS) at about pH 7, e.g., about pH 6.9, about pH 7.0, about pH 7.1, about pH 7.2, about pH 7.3, or about pH 7.4.

[chemical structure]

[0534] LNP01 formulations are described, e.g., in International Application Publication No. WO 2008/042973, which is hereby incorporated by reference.

[0535] Additional exemplary lipid-dsRNA formulations are provided in the following table.

TABLE 4
Exemplary lipid formulations

| | | cationic lipid/non-cationic |
|---|---|---|
| | | lipid/cholesterol/PEG-lipid conjugate |
| | Cationic Lipid | Lipid:siRNA ratio |
| SNALP | 1,2-Dilinolenyloxy-N,N- | DLinDMA/DPPC/Cholesterol/PEG- |
| | dimethylaminopropane (DLinDMA) | cDMA |
| | | (57.1/7.1/34.4/1.4) |
| | | lipid:siRNA~7:1 |
| S-XTC | 2,2-Dilinoleyl-4-dimethylaminoethyl- | XTC/DPPC/Cholesterol/PEG-cDMA |
| | [1,3]-dioxolane (XTC) | 57.1/7.1/34.4/1.4 |
| | | lipid:siRNA~7:1 |
| LNP05 | 2,2-Dilinoleyl-4-dimethylaminoethyl- | XTC/DSPC/Cholesterol/PEG-DMG |
| | [1,3]-dioxolane (XTC) | 57.5/7.5/31.5/3.5 |
| | | lipid:siRNA~6:1 |
| LNP06 | 2,2-Dilinoleyl-4-dimethylaminoethyl- | XTC/DSPC/Cholesterol/PEG-DMG |
| | [1,3]-dioxolane (XTC) | 57.5/7.5/31.5/3.5 |
| | | lipid:siRNA~11:1 |
| LNP07 | 2,2-Dilinoleyl-4-dimethylaminoethyl- | XTC/DSPC/Cholesterol/PEG-DMG |
| | [1,3]-dioxolane (XTC) | 60/7.5/31/1.5, |
| | | lipid:siRNA~6:1 |
| LNP08 | 2,2-Dilinoleyl-4-dimethylaminoethyl- | XTC/DSPC/Cholesterol/PEG-DMG |
| | [1,3]-dioxolane (XTC) | 60/7.5/31/1.5, |
| | | lipid:siRNA~11:1 |
| LNP09 | 2,2-Dilinoleyl-4-dimethylaminoethyl- | XTC/DSPC/Cholesterol/PEG-DMG |
| | [1,3]-dioxolane (XTC) | 50/10/38.5/1.5 |
| | | Lipid:siRNA 10:1 |
| LNP10 | (3aR,5s,6aS)-N,N-dimethyl-2,2- | ALN100/DSPC/Cholesterol/PEG-DMG |
| | di((9Z,12Z)-octadeca-9,12- | 50/10/38.5/1.5 |
| | dienyl)tetrahydro-3aH- | Lipid:siRNA 10:1 |
| | cyclopenta[d][1,3]dioxol-5-amine | |
| | (ALN100) | |
| LNP11 | (6Z,9Z,28Z,31Z)-heptatriaconta- | MC-3/DSPC/Cholesterol/PEG-DMG |
| | 6,9,28,31-tetraen-19-yl 4- | 50/10/38.5/1.5 |
| | (dimethylamino)butanoate (MC3) | Lipid:siRNA 10:1 |
| LNP12 | 1,1′-(2-(4-(2-((2-(bis(2- | C12-200/DSPC/Cholesterol/PEG-DMG |
| | hydroxydodecyl)amino)ethyl)(2- | 50/10/38.5/1.5 |
| | hydroxydodecyl)amino)ethyl)piperazin- | Lipid:siRNA 10:1 |
| | 1-yl)ethylazanediyl)didodecan-2-ol | |
| | (C12-200) | |
| LNP13 | XTC | XTC/DSPC/Chol/PEG-DMG |
| | | 50/10/38.5/1.5 |
| | | Lipid:siRNA: 33:1 |
| LNP14 | MC3 | MC3/DSPC/Chol/PEG-DMG |
| | | 40/15/40/5 |
| | | Lipid:siRNA: 11:1 |
| LNP15 | MC3 | MC3/DSPC/Chol/PEG-DSG/GalNAc- |
| | | PEG-DSG |
| | | 50/10/35/4.5/0.5 |
| | | Lipid:siRNA: 11:1 |
| LNP16 | MC3 | MC3/DSPC/Chol/PEG-DMG |
| | | 50/10/38.5/1.5 |
| | | Lipid:siRNA: 7:1 |
| LNP17 | MC3 | MC3/DSPC/Chol/PEG-DSG |
| | | 50/10/38.5/1.5 |
| | | Lipid:siRNA: 10:1 |
| LNP18 | MC3 | MC3/DSPC/Chol/PEG-DMG |
| | | 50/10/38.5/1.5 |
| | | Lipid:siRNA: 12:1 |
| LNP19 | MC3 | MC3/DSPC/Chol/PEG-DMG |
| | | 50/10/35/5 |
| | | Lipid:siRNA: 8:1 |
| LNP20 | MC3 | MC3/DSPC/Chol/PEG-DPG |
| | | 50/10/38.5/1.5 |
| | | Lipid:siRNA: 10:1 |
| LNP21 | C12-200 | C12-200/DSPC/Chol/PEG-DSG |
| | | 50/10/38.5/1.5 |
| | | Lipid:siRNA: 7:1 |
| LNP22 | XTC | XTC/DSPC/Chol/PEG-DSG |
| | | 50/10/38.5/1.5 |
| | | Lipid:siRNA: 10:1 |

DSPC: distearoylphosphatidylcholine
DPPC: dipalmitoylphosphatidylcholine
PEG-DMG: PEG-didimyristoyl glycerol (C14-PEG, or PEG-C14) (PEG with avg mol wt of 2000)
PEG-DSG: PEG-distyryl glycerol (C18-PEG, or PEG-C18) (PEG with avg mol wt of 2000)
PEG-cDMA: PEG-carbamoyl-1,2-dimyristyloxypropylamine (PEG with avg mol wt of 2000)

[0536] SNALP (1,2-Dilinolenyloxy-N,N-dimethylaminopropane (DLinDMA)) comprising formulations are described in International Publication No. WO2009/127060, filed Apr. 15, 2009, which is hereby incorporated by reference.

[0537] XTC comprising formulations are described, e.g., in U.S. Provisional Ser. No. 61/148,366, filed Jan. 29, 2009; U.S. Provisional Ser. No. 61/156,851, filed Mar. 2, 2009; U.S. Provisional Ser. No. 61/185,712, filed Jun. 10, 2009: U.S. Provisional Ser. No. 61/228,373, filed Jul. 24, 2009; U.S. Provisional Ser. No. 61/239,686, filed Sep. 3, 2009, and International Application No. PCT/US2010/022614, filed Jan. 29, 2010, which are hereby incorporated by reference.

[0538] MC3 comprising formulations are described, e.g., in U.S. Provisional Ser. No. 61/244,834, filed Sep. 22, 2009, U.S. Provisional Ser. No. 61/185,800, filed Jun. 10, 2009, and International Application No. PCT/US10/28224, filed Jun. 10, 2010, which are hereby incorporated by reference.

[0539] ALNY-100 comprising formulations are described, e.g., International patent application number PCT/US09/63933, filed on Nov. 10, 2009, which is hereby incorporated by reference.

[0540] C12-200 comprising formulations are described in U.S. Provisional Ser. No. 61/175,770, filed May 5, 2009 and International Application No. PCT/US10/33777, filed May 5, 2010, which are hereby incorporated by reference.

### C. Synthesis of Cationic Lipids

[0541] Any of the compounds, e.g., cationic lipids and the like, used in the nucleic acid-lipid particles featured in the disclosure may be prepared by known organic synthesis techniques. All substituents are as defined below unless indicated otherwise.

[0542] “Alkyl” means a straight chain or branched, noncyclic or cyclic, saturated aliphatic hydrocarbon containing from 1 to 24 carbon atoms. Representative saturated straight chain alkyls include methyl, ethyl, n-propyl, n-butyl, n-pentyl, n-hexyl, and the like; while saturated branched alkyls include isopropyl, sec-butyl, isobutyl, tert-butyl, isopentyl, and the like. Representative saturated cyclic alkyls include cyclopropyl, cyclobutyl, cyclopentyl, cyclohexyl, and the like; while unsaturated cyclic alkyls include cyclopentenyl and cyclohexenyl, and the like.

[0543] “Alkenyl” means an alkyl, as defined above, containing at least one double bond between adjacent carbon atoms. Alkenyls include both cis and trans isomers. Representative straight chain and branched alkenyls include ethylenyl, propylenyl, 1-butenyl, 2-butenyl, isobutylenyl, 1-pentenyl, 2-pentenyl, 3-methyl-1-butenyl, 2-methyl-2-butenyl, 2,3-dimethyl-2-butenyl, and the like.

[0544] “Alkynyl” means any alkyl or alkenyl, as defined above, which additionally contains at least one triple bond between adjacent carbons. Representative straight chain and branched alkynyls include acetylenyl, propynyl, 1-butynyl, 2-butynyl, 1-pentynyl, 2-pentynyl, 3-methyl-1 butynyl, and the like.

[0545] “Acyl” means any alkyl, alkenyl, or alkynyl wherein the carbon at the point of attachment is substituted with an oxo group, as defined below. For example, —C(═O)alkyl, —C(═O)alkenyl, and —C(═O)alkynyl are acyl groups.

[0546] “Heterocycle” means a 5- to 7-membered monocyclic, or 7- to 10-membered bicyclic, heterocyclic ring which is either saturated, unsaturated, or aromatic, and which contains from 1 or 2 heteroatoms independently selected from nitrogen, oxygen and sulfur, and wherein the nitrogen and sulfur heteroatoms may be optionally oxidized, and the nitrogen heteroatom may be optionally quaternized, including bicyclic rings in which any of the above heterocycles are fused to a benzene ring. The heterocycle may be attached via any heteroatom or carbon atom. Heterocycles include heteroaryls as defined below. Heterocycles include morpholinyl, pyrrolidinonyl, pyrrolidinyl, piperidinyl, piperizynyl, hydantoinyl, valerolactamyl, oxiranyl, oxetanyl, tetrahydrofuranyl, tetrahydropyranyl, tetrahydropyridinyl, tetrahydroprimidinyl, tetrahydrothiophenyl, tetrahydrothiopyranyl, tetrahydropyrimidinyl, tetrahydrothiophenyl, tetrahydrothiopyranyl, and the like.

[0547] The terms “optionally substituted alkyl”, “optionally substituted alkenyl”, “optionally substituted alkynyl”, “optionally substituted acyl”, and “optionally substituted heterocycle” means that, when substituted, at least one hydrogen atom is replaced with a substituent. In the case of an oxo substituent (═O) two hydrogen atoms are replaced. In this regard, substituents include oxo, halogen, heterocycle, —CN, —OR^{x}, —NR^{x}R^{y}, —NR^{x}(═O)R^{y}, —NR^{x}SO₂R^{y}, —C(═O)R^{x}, —C(═O)OR^{x}, —C(═O)NR^{x}R^{y}, —SOₙR^{x} and —SOₙNR^{x}R^{y}, wherein n is 0, 1 or 2, R^{x} and R^{y} are the same or different and independently hydrogen, alkyl or heterocycle, and each of said alkyl and heterocycle substituents may be further substituted with one or more of oxo, halogen, —OH, —CN, alkyl, —OR^{x}, heterocycle, —NR^{x}R^{y}, —NR^{x}C(═O)R^{y}, —NR^{x}SO₂R^{y}, —C(═O)R^{x}, —C(═O)OR^{x}, —C(═O)NR^{x}R^{y}, —SOₙR^{x} and —SOₙNR^{x}R^{y}.

[0548] “Halogen” means fluoro, chloro, bromo and iodo.

[0549] In some embodiments, the methods featured in the disclosure may require the use of protecting groups. Protecting group methodology is well known to those skilled in the art (see, for example, PROTECTIVE GROUPS IN ORGANIC SYNTHESIS, Green, T. W. et al., Wiley-Interscience, New York City, 1999). Briefly, protecting groups within the context of this disclosure are any group that reduces or eliminates unwanted reactivity of a functional group. A protecting group can be added to a functional group to mask its reactivity during certain reactions and then removed to reveal the original functional group. In some embodiments an “alcohol protecting group” is used. An “alcohol protecting group” is any group which decreases or eliminates unwanted reactivity of an alcohol functional group. Protecting groups can be added and removed using techniques well known in the art.

### Synthesis of Formula A

[0550] In some embodiments, nucleic acid-lipid particles featured in the disclosure are formulated using a cationic lipid of formula A:

[chemical structure]

where R1 and R2 are independently alkyl, alkenyl or alkynyl, each can be optionally substituted, and R3 and R4 are independently lower alkyl or R3 and R4 can be taken together to form an optionally substituted heterocyclic ring. In some embodiments, the cationic lipid is XTC (2,2-Dilinoleyl-4-dimethylaminoethyl-[1,3]-dioxolane). In general, the lipid of formula A above may be made by the following Reaction Schemes 1 or 2, wherein all substituents are as defined above unless indicated otherwise.

[chemical structure]

[0551] Lipid A, where R₁ and R₂ are independently alkyl, alkenyl or alkynyl, each can be optionally substituted, and R3 and R4 are independently lower alkyl or R3 and R4 can be taken together to form an optionally substituted heterocyclic ring, can be prepared according to Scheme 1. Ketone 1 and bromide 2 can be purchased or prepared according to methods known to those of ordinary skill in the art. Reaction of 1 and 2 yields ketal 3. Treatment of ketal 3 with amine 4 yields lipids of formula A. The lipids of formula A can be converted to the corresponding ammonium salt with an organic salt of formula 5, where X is anion counter ion selected from halogen, hydroxide, phosphate, sulfate, or the like.

[chemical structure]

[0552] Alternatively, the ketone 1 starting material can be prepared according to Scheme 2. Grignard reagent 6 and cyanide 7 can be purchased or prepared according to methods known to those of ordinary skill in the art. Reaction of 6 and 7 yields ketone 1. Conversion of ketone 1 to the corresponding lipids of formula A is as described in Scheme 1.

### Synthesis of MC3

[0553] Preparation of DLin-M-C3-DMA (i.e., (6Z,9Z,28Z,31Z)-heptatriaconta-6,9,28,31-tetraen-19-yl 4-(dimethylamino)butanoate) was as follows. A solution of (6Z,9Z,28Z,31Z)-heptatriaconta-6,9,28,31-tetraen-19-ol (0.53 g), 4-N,N-dimethylaminobutyric acid hydrochloride (0.51 g), 4-N,N-dimethylaminopyridine (0.61 g) and 1-ethyl-3-(3-dimethylaminopropyl)carbodiimide hydrochloride (0.53 g) in dichloromethane (5 mL) was stirred at room temperature overnight. The solution was washed with dilute hydrochloric acid followed by dilute aqueous sodium bicarbonate. The organic fractions were dried over anhydrous magnesium sulphate, filtered and the solvent removed on a rotovap. The residue was passed down a silica gel column (20 g) using a 1-5% methanol/dichloromethane elution gradient. Fractions containing the purified product were combined and the solvent removed, yielding a colorless oil (0.54 g).

### Synthesis of ALNY-100

[0554] Synthesis of ketal 519 [ALNY-100] was performed using the following scheme 3:

[chemical structure]

### Synthesis of 515:

[0555] To a stirred suspension of LiAlH4 (3.74 g, 0.09852 mol) in 200 ml anhydrous THF in a two neck RBF (1 L), was added a solution of 514 (10 g, 0.04926 mol) in 70 mL of THF slowly at 0° C. under nitrogen atmosphere. After complete addition, reaction mixture was warmed to room temperature and then heated to reflux for 4 h. Progress of the reaction was monitored by TLC. After completion of reaction (by TLC) the mixture was cooled to 0° C. and quenched with careful addition of saturated Na2SO4 solution. Reaction mixture was stirred for 4 h at room temperature and filtered off. Residue was washed well with THF. The filtrate and washings were mixed and diluted with 400 mL dioxane and 26 mL conc. HCl and stirred for 20 minutes at room temperature. The volatilities were stripped off under vacuum to furnish the hydrochloride salt of 515 as a white solid. Yield: 7.12 g 1H-NMR (DMSO, 400 MHz): δ=9.34 (broad, 2H), 5.68 (s, 2H), 3.74 (m, 1H), 2.66-2.60 (m, 2H), 2.50-2.45 (m, 5H).

### Synthesis of 516:

[0556] To a stirred solution of compound 515 in 100 mL dry DCM in a 250 mL two neck RBF, was added NEt3 (37.2 mL, 0.2669 mol) and cooled to 0° C. under nitrogen atmosphere. After a slow addition of N-(benzyloxy-carbonyloxy)-succinimide (20 g, 0.08007 mol) in 50 mL dry DCM, reaction mixture was allowed to warm to room temperature. After completion of the reaction (2-3 h by TLC) mixture was washed successively with IN HCl solution (1×100 mL) and saturated NaHCO₃solution (1×50 mL). The organic layer was then dried over anhyd. Na2SO4 and the solvent was evaporated to give crude material which was purified by silica gel column chromatography to get 516 as sticky mass. Yield: 11 g (89%). 1H-NMR (CDCl3, 400 MHz): δ=7.36-7.27 (m, 5H), 5.69 (s, 2H), 5.12 (s, 2H), 4.96 (br., 1H) 2.74 (s, 3H), 2.60 (m, 2H), 2.30-2.25 (m, 2H). LC-MS [M+H]− 232.3 (96.94%).

### Synthesis of 517A and 517B:

[0557] The cyclopentene 516 (5 g, 0.02164 mol) was dissolved in a solution of 220 mL acetone and water (10:1) in a single neck 500 mL RBF and to it was added N-methyl morpholine-N-oxide (7.6 g, 0.06492 mol) followed by 4.2 mL of 7.6% solution of OsO4 (0.275 g, 0.00108 mol) in tert-butanol at room temperature. After completion of the reaction (˜3 h), the mixture was quenched with addition of solid Na2SO3 and resulting mixture was stirred for 1.5 h at room temperature. Reaction mixture was diluted with DCM (300 mL) and washed with water (2×100 mL) followed by saturated NaHCO3 (1×50 mL) solution, water (1×30 mL) and finally with brine (1x 50 mL). Organic phase was dried over an·Na2SO4 and solvent was removed in vacuum. Silica gel column chromatographic purification of the crude material was afforded a mixture of diastereomers, which were separated by prep HPLC. Yield: −6 g crude

[0558] 517A —Peak-1 (white solid), 5.13 g (96%). 1H-NMR (DMSO, 400 MHz): δ=7.39-7.31 (m, 5H), 5.04 (s, 2H), 4.78-4.73 (m, 1H), 4.48-4.47 (d, 2H), 3.94-3.93 (m, 2H), 2.71 (s, 3H), 1.72-1.67 (m, 4H). LC-MS −[M+H]−266.3, [M+NH4+]−283.5 present, HPLC-97.86%. Stereochemistry confirmed by X-ray.

### Synthesis of 518:

[0559] Using a procedure analogous to that described for the synthesis of compound 505, compound 518 (1.2 g, 41%) was obtained as a colorless oil. 1H-NMR (CDCl3, 400 MHz): δ=7.35-7.33 (m, 4H), 7.30-7.27 (m, 1H), 5.37-5.27 (m, 8H), 5.12 (s, 2H), 4.75(m, 1H), 4.58-4.57 (m, 2H), 2.78-2.74 (m, 7H), 2.06-2.00 (m, 8H), 1.96-1.91 (m, 2H), 1.62 (m, 4H), 1.48 (m, 2H), 1.37-1.25(br m, 36H), 0.87 (m, 6H). HPLC-98.65%.

### General Procedure for the Synthesis of Compound 519:

[0560] A solution of compound 518 (1 eq) in hexane (15 mL) was added in a drop-wise fashion to an ice-cold solution of LAH in THF (1 M, 2 eq). After complete addition, the mixture was heated at 40° C. over 0.5 h then cooled again on an ice bath. The mixture was carefully hydrolyzed with saturated aqueous Na2SO4 then filtered through celite and reduced to an oil. Column chromatography provided the pure 519 (1.3 g, 68%) which was obtained as a colorless oil. 13C NMR=130.2, 130.1 (×2), 127.9 (×3), 112.3, 79.3, 64.4, 44.7, 38.3, 35.4, 31.5, 29.9 (×2), 29.7, 29.6 (×2), 29.5 (×3), 29.3 (×2), 27.2 (×3), 25.6, 24.5, 23.3, 226, 14.1; Electrospray MS (+ve): Molecular weight for C44H80NO2 (M+H)+ Calc. 654.6, Found 654.6.

[0561] Formulations prepared by either the standard or extrusion-free method can be characterized in similar manners. For example, formulations are typically characterized by visual inspection. They should be whitish translucent solutions free from aggregates or sediment. Particle size and particle size distribution of lipid-nanoparticles can be measured by light scattering using, for example, a Malvern Zetasizer Nano ZS (Malvern, USA). Particles should be about 20-300 nm, such as 40-100 nm in size. The particle size distribution should be unimodal. The total dsRNA concentration in the formulation, as well as the entrapped fraction, is estimated using a dye exclusion assay. A sample of the formulated dsRNA can be incubated with an RNA-binding dye, such as Ribogreen (Molecular Probes) in the presence or absence of a formulation disrupting surfactant, e.g., 0.5% Triton-X100. The total dsRNA in the formulation can be determined by the signal from the sample containing the surfactant, relative to a standard curve. The entrapped fraction is determined by subtracting the “free” dsRNA content (as measured by the signal in the absence of surfactant) from the total dsRNA content. Percent entrapped dsRNA is typically >85%. For SNALP formulation, the particle size is at least 30 nm, at least 40 nm, at least 50 nm, at least 60 nm, at least 70 nm, at least 80 nm, at least 90 nm, at least 100 nm, at least 110 nm, and at least 120 nm. The suitable range is typically about at least 50 nm to about at least 110 nm, about at least 60 nm to about at least 100 nm, or about at least 80 nm to about at least 90 nm.

[0562] Compositions and formulations for oral administration include powders or granules, microparticulates, nanoparticulates, suspensions or solutions in water or non-aqueous media, capsules, gel capsules, sachets, tablets or minitablets. Thickeners, flavoring agents, diluents, emulsifiers, dispersing aids or binders may be desirable. In some embodiments, oral formulations are those in which dsRNAs featured in the disclosure are administered in conjunction with one or more penetration enhancers surfactants and chelators. Suitable surfactants include fatty acids and/or esters or salts thereof, bile acids and/or salts thereof. Suitable bile acids/salts include chenodeoxycholic acid (CDCA) and ursodeoxychenodeoxycholic acid (UDCA), cholic acid, dehydrocholic acid, deoxycholic acid, glucholic acid, glycholic acid, glycodeoxycholic acid, taurocholic acid, taurodeoxycholic acid, sodium tauro-24,25-dihydro-fusidate and sodium glycodihydrofusidate. Suitable fatty acids include arachidonic acid, undecanoic acid, oleic acid, lauric acid, caprylic acid, capric acid, myristic acid, palmitic acid, stearic acid, linoleic acid, linolenic acid, dicaprate, tricaprate, monoolein, dilaurin, glyceryl 1-monocaprate, 1-dodecylazacycloheptan-2-one, an acylcarnitine, an acylcholine, or a monoglyceride, a diglyceride or a pharmaceutically acceptable salt thereof (e.g., sodium). In some embodiments, combinations of penetration enhancers are used, for example, fatty acids/salts in combination with bile acids/salts. One exemplary combination is the sodium salt of lauric acid, capric acid and UDCA. Further penetration enhancers include polyoxyethylene-9-lauryl ether, polyoxyethylene-20-cetyl ether. DsRNAs featured in the disclosure may be delivered orally, in granular form including sprayed dried particles, or complexed to form micro or nanoparticles. DsRNA complexing agents include poly-amino acids; polyimines; polyacrylates; polyalkylacrylates, polyoxethanes, polyalkylcyanoacrylates; cationized gelatins, albumins, starches, acrylates, polyethyleneglycols (PEG) and starches; polyalkylcyanoacrylates; DEAE-derivatized polyimines, pollulans, celluloses and starches. Suitable complexing agents include chitosan, N-trimethylchitosan, poly-L-lysine, polyhistidine, polyornithine, polyspermines, protamine, polyvinylpyridine, polythiodiethylaminomethylethylene P(TDAE), polyaminostyrene (e.g., p-amino), poly(methylcyanoacrylate), poly(ethylcyanoacrylate), poly(butylcyanoacrylate), poly(isobutylcyanoacrylate), poly(isohexylcynaoacrylate), DEAE-methacrylate, DEAE-hexylacrylate, DEAE-acrylamide, DEAE-albumin and DEAE-dextran, polymethylacrylate, polyhexylacrylate, poly(D,L-lactic acid), poly(DL-lactic-co-glycolic acid (PLGA), alginate, and polyethyleneglycol (PEG). Oral formulations for dsRNAs and their preparation are described in detail in U.S. Pat. No. 6,887,906, US Publn. No. 20030027780, and U.S. Pat. No. 6,747,014, each of which is incorporated herein by reference.

[0563] Compositions and formulations for parenteral, intraparenchymal (into the brain), intrathecal, intravitreal, subretinal, transscleral, subconjunctival, retrobulbar, intracameral, intraventricular, or intrahepatic administration may include sterile aqueous solutions which may also contain buffers, diluents and other suitable additives such as, but not limited to, penetration enhancers, carrier compounds and other pharmaceutically acceptable carriers or excipients.

[0564] Pharmaceutical compositions of the present disclosure include, but are not limited to, solutions, emulsions, and liposome-containing formulations. These compositions may be generated from a variety of components that include, but are not limited to, preformed liquids, self-emulsifying solids and self-emulsifying semisolids.

[0565] The pharmaceutical formulations featured in the present disclosure, which may conveniently be presented in unit dosage form, may be prepared according to conventional techniques well known in the pharmaceutical industry. Such techniques include the step of bringing into association the active ingredients with the pharmaceutical carrier(s) or excipient(s). In general, the formulations are prepared by uniformly and intimately bringing into association the active ingredients with liquid carriers or finely divided solid carriers or both, and then, if necessary, shaping the product.

[0566] The compositions featured in the present disclosure may be formulated into any of many possible dosage forms such as, but not limited to, tablets, capsules, gel capsules, liquid syrups, soft gels, suppositories, and enemas. The compositions may also be formulated as suspensions in aqueous, non-aqueous or mixed media. Aqueous suspensions may further contain substances which increase the viscosity of the suspension including, for example, sodium carboxymethylcellulose, sorbitol and/or dextran. The suspension may also contain stabilizers.

### D. Additional Formulations

i. Emulsions

[0567] The compositions of the present disclosure may be prepared and formulated as emulsions. Emulsions are typically heterogeneous systems of one liquid dispersed in another in the form of droplets usually exceeding 0.1p m in diameter (see e.g., Ansel's Pharmaceutical Dosage Forms and Drug Delivery Systems, Allen, L V., Popovich N G., and Ansel H C., 2004, Lippincott Williams & Wilkins (8th ed.), New York, NY; Idson, in Pharmaceutical Dosage Forms, Lieberman, Rieger and Banker (Eds.), 1988, Marcel Dekker, Inc., New York, N.Y., volume 1, p. 199; Rosoff, in Pharmaceutical Dosage Forms, Lieberman, Rieger and Banker (Eds.), 1988, Marcel Dekker, Inc., New York, N.Y., Volume 1, p. 245; Block in Pharmaceutical Dosage Forms, Lieberman, Rieger and Banker (Eds.), 1988, Marcel Dekker, Inc., New York, N.Y., volume 2, p. 335; Higuchi et al., in Remington's Pharmaceutical Sciences, Mack Publishing Co., Easton, Pa., 1985, p. 301). Emulsions are often biphasic systems comprising two immiscible liquid phases intimately mixed and dispersed with each other. In general, emulsions may be of either the water-in-oil (w/o) or the oil-in-water (o/w) variety. When an aqueous phase is finely divided into and dispersed as minute droplets into a bulk oily phase, the resulting composition is called a water-in-oil (w/o) emulsion. Alternatively, when an oily phase is finely divided into and dispersed as minute droplets into a bulk aqueous phase, the resulting composition is called an oil-in-water (o/w) emulsion. Emulsions may contain additional components in addition to the dispersed phases, and the active drug which may be present as a solution in either the aqueous phase, oily phase or itself as a separate phase. Pharmaceutical excipients such as emulsifiers, stabilizers, dyes, and anti-oxidants may also be present in emulsions as needed. Pharmaceutical emulsions may also be multiple emulsions that are comprised of more than two phases such as, for example, in the case of oil-in-water-in-oil (o/w/o) and water-in-oil-in-water (w/o/w) emulsions. Such complex formulations often provide certain advantages that simple binary emulsions do not. Multiple emulsions in which individual oil droplets of an o/w emulsion enclose small water droplets constitute a w/o/w emulsion. Likewise, a system of oil droplets enclosed in globules of water stabilized in an oily continuous phase provides an o/w/o emulsion.

[0568] Emulsions are characterized by little or no thermodynamic stability. Often, the dispersed or discontinuous phase of the emulsion is well dispersed into the external or continuous phase and maintained in this form through the means of emulsifiers or the viscosity of the formulation. Either of the phases of the emulsion may be a semisolid or a solid, as is the case of emulsion-style ointment bases and creams. Other means of stabilizing emulsions entail the use of emulsifiers that may be incorporated into either phase of the emulsion. Emulsifiers may broadly be classified into four categories: synthetic surfactants, naturally occurring emulsifiers, absorption bases, and finely dispersed solids (see e.g., Ansel's Pharmaceutical Dosage Forms and Drug Delivery Systems, Allen, L V., Popovich N G., and Ansel H C., 2004, Lippincott Williams & Wilkins (8th ed.), New York, NY; Idson, in Pharmaceutical Dosage Forms, Lieberman, Rieger and Banker (Eds.), 1988, Marcel Dekker, Inc., New York, N.Y., volume 1, p. 199).

[0569] Synthetic surfactants, also known as surface active agents, have found wide applicability in the formulation of emulsions and have been reviewed in the literature (see e.g., Ansel's Pharmaceutical Dosage Forms and Drug Delivery Systems, Allen, L V., Popovich N G., and Ansel H C., 2004, Lippincott Williams & Wilkins (8th ed.), New York, NY; Rieger, in Pharmaceutical Dosage Forms, Lieberman, Rieger and Banker (Eds.), 1988, Marcel Dekker, Inc., New York, N.Y., volume 1, p. 285; Idson, in Pharmaceutical Dosage Forms, Lieberman, Rieger and Banker (Eds.), Marcel Dekker, Inc., New York, N.Y., 1988, volume 1, p. 199). Surfactants are typically amphiphilic and comprise a hydrophilic and a hydrophobic portion. The ratio of the hydrophilic to the hydrophobic nature of the surfactant has been termed the hydrophile/lipophile balance (HLB) and is a valuable tool in categorizing and selecting surfactants in the preparation of formulations. Surfactants may be classified into different classes based on the nature of the hydrophilic group: nonionic, anionic, cationic and amphoteric (see e.g., Ansel's Pharmaceutical Dosage Forms and Drug Delivery Systems, Allen, L V., Popovich N G., and Ansel H C., 2004, Lippincott Williams & Wilkins (8th ed.), New York, NY Rieger, in Pharmaceutical Dosage Forms, Lieberman, Rieger and Banker (Eds.), 1988, Marcel Dekker, Inc., New York, N.Y., volume 1, p. 285).

[0570] Naturally occurring emulsifiers used in emulsion formulations include lanolin, beeswax, phosphatides, lecithin and acacia. Absorption bases possess hydrophilic properties such that they can soak up water to form w/o emulsions yet retain their semisolid consistencies, such as anhydrous lanolin and hydrophilic petrolatum. Finely divided solids have also been used as good emulsifiers especially in combination with surfactants and in viscous preparations. These include polar inorganic solids, such as heavy metal hydroxides, nonswelling clays such as bentonite, attapulgite, hectorite, kaolin, montmorillonite, colloidal aluminum silicate and colloidal magnesium aluminum silicate, pigments and nonpolar solids such as carbon or glyceryl tristearate.

[0571] A large variety of non-emulsifying materials are also included in emulsion formulations and contribute to the properties of emulsions. These include fats, oils, waxes, fatty acids, fatty alcohols, fatty esters, humectants, hydrophilic colloids, preservatives and antioxidants (Block, in Pharmaceutical Dosage Forms, Lieberman, Rieger and Banker (Eds.), 1988, Marcel Dekker, Inc., New York, N.Y., volume 1, p. 335; Idson, in Pharmaceutical Dosage Forms, Lieberman, Rieger and Banker (Eds.), 1988, Marcel Dekker, Inc., New York, N.Y., volume 1, p. 199).

[0572] Hydrophilic colloids or hydrocolloids include naturally occurring gums and synthetic polymers such as polysaccharides (for example, acacia, agar, alginic acid, carrageenan, guar gum, karaya gum, and tragacanth), cellulose derivatives (for example, carboxymethylcellulose and carboxypropylcellulose), and synthetic polymers (for example, carbomers, cellulose ethers, and carboxyvinyl polymers). These disperse or swell in water to form colloidal solutions that stabilize emulsions by forming strong interfacial films around the dispersed-phase droplets and by increasing the viscosity of the external phase.

[0573] Since emulsions often contain a number of ingredients such as carbohydrates, proteins, sterols and phosphatides that may readily support the growth of microbes, these formulations often incorporate preservatives. Commonly used preservatives included in emulsion formulations include methyl paraben, propyl paraben, quaternary ammonium salts, benzalkonium chloride, esters of p-hydroxybenzoic acid, and boric acid. Antioxidants are also commonly added to emulsion formulations to prevent deterioration of the formulation. Antioxidants used may be free radical scavengers such as tocopherols, alkyl gallates, butylated hydroxyanisole, butylated hydroxytoluene, or reducing agents such as ascorbic acid and sodium metabisulfite, and antioxidant synergists such as citric acid, tartaric acid, and lecithin.

[0574] The application of emulsion formulations via dermatological, oral and parenteral routes and methods for their manufacture have been reviewed in the literature (see e.g., Ansel's Pharmaceutical Dosage Forms and Drug Delivery Systems, Allen, L V., Popovich N G., and Ansel H C., 2004, Lippincott Williams & Wilkins (8th ed.), New York, NY; Idson, in Pharmaceutical Dosage Forms, Lieberman, Rieger and Banker (Eds.), 1988, Marcel Dekker, Inc., New York, N.Y., volume 1, p. 199). Emulsion formulations for oral delivery have been very widely used because of ease of formulation, as well as efficacy from an absorption and bioavailability standpoint (see e.g., Ansel's Pharmaceutical Dosage Forms and Drug Delivery Systems, Allen, L V., Popovich N G., and Ansel H C., 2004, Lippincott Williams & Wilkins (8th ed.), New York, NY; Rosoff, in Pharmaceutical Dosage Forms, Lieberman, Rieger and Banker (Eds.), 1988, Marcel Dekker, Inc., New York, N.Y., volume 1, p. 245; Idson, in Pharmaceutical Dosage Forms, Lieberman, Rieger and Banker (Eds.), 1988, Marcel Dekker, Inc., New York, N.Y., volume 1, p. 199). Mineral-oil base laxatives, oil-soluble vitamins and high fat nutritive preparations are among the materials that have commonly been administered orally as o/w emulsions.

[0575] In some embodiments of the present disclosure, the compositions of iRNAs and nucleic acids are formulated as microemulsions. A microemulsion may be defined as a system of water, oil and amphiphile which is a single optically isotropic and thermodynamically stable liquid solution (see e.g., Ansel's Pharmaceutical Dosage Forms and Drug Delivery Systems, Allen, LV., Popovich N G., and Ansel H C., 2004, Lippincott Williams & Wilkins (8th ed.), New York, NY; Rosoff, in Pharmaceutical Dosage Forms, Lieberman, Rieger and Banker (Eds.), 1988, Marcel Dekker, Inc., New York, N.Y., volume 1, p. 245). Typically, microemulsions are systems that are prepared by first dispersing an oil in an aqueous surfactant solution and then adding a sufficient amount of a fourth component, generally an intermediate chain-length alcohol to form a transparent system. Therefore, microemulsions have also been described as thermodynamically stable, isotopically clear dispersions of two immiscible liquids that are stabilized by interfacial films of surface-active molecules (Leung and Shah, in: (Controlled Release of Drugs: Polymers and Aggregate Systems, Rosoff, M., Ed., 1989, VCH Publishers, New York, pages 185-215). Microemulsions commonly are prepared via a combination of three to five components that include oil, water, surfactant, cosurfactant and electrolyte. Whether the microemulsion is of the water-in-oil (w/o) or an oil-in-water (o/w) type is dependent on the properties of the oil and surfactant used and on the structure and geometric packing of the polar heads and hydrocarbon tails of the surfactant molecules (Schott, in Remington's Pharmaceutical Sciences, Mack Publishing Co., Easton, Pa., 1985, p. 271).

[0576] The phenomenological approach utilizing phase diagrams has been extensively studied and has yielded a comprehensive knowledge, to one skilled in the art, of how to formulate microemulsions (see e.g., Ansel's Pharmaceutical Dosage Forms and Drug Delivery Systems, Allen, L V., Popovich N G., and Ansel H C., 2004, Lippincott Williams & Wilkins (8th ed.), New York, NY; Rosoff, in Pharmaceutical Dosage Forms, Lieberman, Rieger and Banker (Eds.), 1988, Marcel Dekker, Inc., New York, N.Y., volume 1, p. 245; Block, in Pharmaceutical Dosage Forms, Lieberman, Rieger and Banker (Eds.), 1988, Marcel Dekker, Inc., New York, N.Y., volume 1, p. 335). Compared to conventional emulsions, microemulsions offer the advantage of solubilizing water-insoluble drugs in a formulation of thermodynamically stable droplets that are formed spontaneously.

[0577] Surfactants used in the preparation of microemulsions include, but are not limited to, ionic surfactants, non-ionic surfactants, Brij 96, polyoxyethylene oleyl ethers, polyglycerol fatty acid esters, tetraglycerol monolaurate (ML310), tetraglycerol monooleate (MO310), hexaglycerol monooleate (PO310), hexaglycerol pentaoleate (PO500), decaglycerol monocaprate (MCA750), decaglycerol monooleate (MO750), decaglycerol sequioleate (SO750), decaglycerol decaoleate (DAO750), alone or in combination with cosurfactants. The cosurfactant, usually a short-chain alcohol such as ethanol, 1-propanol, and 1-butanol, serves to increase the interfacial fluidity by penetrating into the surfactant film and consequently creating a disordered film because of the void space generated among surfactant molecules. Microemulsions may, however, be prepared without the use of cosurfactants and alcohol-free self-emulsifying microemulsion systems are known in the art. The aqueous phase may typically be, but is not limited to, water, an aqueous solution of the drug, glycerol, PEG300, PEG400, polyglycerols, propylene glycols, and derivatives of ethylene glycol. The oil phase may include, but is not limited to, materials such as Captex 300, Captex 355, Capmul MCM, fatty acid esters, medium chain (C8-C12) mono, di, and tri-glycerides, polyoxyethylated glyceryl fatty acid esters, fatty alcohols, polyglycolized glycerides, saturated polyglycolized C8-C10 glycerides, vegetable oils and silicone oil.

[0578] Microemulsions are particularly of interest from the standpoint of drug solubilization and the enhanced absorption of drugs. Lipid based microemulsions (both o/w and w/o) have been proposed to enhance the oral bioavailability of drugs, including peptides (see e.g., U.S. Pat. Nos. 6,191,105; 7,063,860; 7,070,802; 7,157,099; Constantinides et al., Pharmaceutical Research, 1994, 11, 1385-1390; Ritschel, Meth. Find. Exp. Clin. Pharmacol., 1993, 13, 205). Microemulsions afford advantages of improved drug solubilization, protection of drug from enzymatic hydrolysis, possible enhancement of drug absorption due to surfactant-induced alterations in membrane fluidity and permeability, ease of preparation, ease of oral administration over solid dosage forms, improved clinical potency, and decreased toxicity (see e.g., U.S. Pat. Nos. 6,191,105; 7,063,860; 7,070,802; 7,157,099; Constantinides et al., Pharmaceutical Research, 1994, 11, 1385; Ho et al., J. Pharm. Sci., 1996, 85, 138-143). Often microemulsions may form spontaneously when their components are brought together at ambient temperature. This may be particularly advantageous when formulating thermolabile drugs, peptides or iRNAs. Microemulsions have also been effective in the transdermal delivery of active components in both cosmetic and pharmaceutical applications. It is expected that the microemulsion compositions and formulations of the present disclosure will facilitate the increased systemic absorption of iRNAs and nucleic acids from the gastrointestinal tract, as well as improve the local cellular uptake of iRNAs and nucleic acids.

[0579] Microemulsions of the present disclosure may also contain additional components and additives such as sorbitan monostearate (Grill 3), Labrasol, and penetration enhancers to improve the properties of the formulation and to enhance the absorption of the iRNAs and nucleic acids of the present disclosure. Penetration enhancers used in the microemulsions of the present disclosure may be classified as belonging to one of five broad categories-surfactants, fatty acids, bile salts, chelating agents, and non-chelating non-surfactants (Lee et al., Critical Reviews in Therapeutic Drug Carrier Systems, 1991, p. 92). Each of these classes has been discussed above.

ii. Penetration Enhancers

[0580] In some embodiments, the present disclosure employs various penetration enhancers to effect the efficient delivery of nucleic acids, particularly iRNAs, to the skin of animals. Most drugs are present in solution in both ionized and nonionized forms. However, usually only lipid soluble or lipophilic drugs readily cross cell membranes. It has been discovered that even non-lipophilic drugs may cross cell membranes if the membrane to be crossed is treated with a penetration enhancer. In addition to aiding the diffusion of non-lipophilic drugs across cell membranes, penetration enhancers also enhance the permeability of lipophilic drugs.

[0581] Penetration enhancers may be classified as belonging to one of five broad categories, i.e., surfactants, fatty acids, bile salts, chelating agents, and non-chelating non-surfactants (see e.g., Malmsten, M. Surfactants and polymers in drug delivery, Informa Health Care, New York, NY, 2002; Lee et al., Critical Reviews in Therapeutic Drug Carrier Systems, 1991, p. 92). Each of the above-mentioned classes of penetration enhancers are described below in greater detail.

[0582] Surfactants: In connection with the present disclosure, surfactants (or “surface-active agents”) are chemical entities which, when dissolved in an aqueous solution, reduce the surface tension of the solution or the interfacial tension between the aqueous solution and another liquid, with the result that absorption of iRNAs through the mucosa is enhanced. In addition to bile salts and fatty acids, these penetration enhancers include, for example, sodium lauryl sulfate, polyoxyethylene-9-lauryl ether and polyoxyethylene-20-cetyl ether) (see e.g., Malmsten, M. Surfactants and polymers in drug delivery, Informa Health Care, New York, NY, 2002: Lee et al., Critical Reviews in Therapeutic Drug Carrier Systems, 1991, p. 92); and perfluorochemical emulsions, such as FC-43. Takahashi et al., J. Pharm. Pharmacol., 1988, 40, 252).

[0583] Fatty acids: Various fatty acids and their derivatives which act as penetration enhancers include, for example, oleic acid, lauric acid, capric acid (n-decanoic acid), myristic acid, palmitic acid, stearic acid, linoleic acid, linolenic acid, dicaprate, tricaprate, monoolein (1-monooleoyl-rac-glycerol), dilaurin, caprylic acid, arachidonic acid, glycerol 1-monocaprate, 1-dodecylazacycloheptan-2-one, acylcarnitines, acylcholines, C₁₋₂₀ alkyl esters thereof (e.g., methyl, isopropyl and t-butyl), and mono- and di-glycerides thereof (i.e., oleate, laurate, caprate, myristate, palmitate, stearate, linoleate, etc.) (see e.g., Touitou, E., et al. Enhancement in Drug Delivery, CRC Press, Danvers, M A, 2006; Lee et al., Critical Reviews in Therapeutic Drug Carrier Systems, 1991, p. 92; Muranishi, Critical Reviews in Therapeutic Drug Carrier Systems, 1990, 7, 1-33; El Hariri et al., J. Pharm. Pharmacol., 1992, 44, 651-654).

[0584] Bile salts: The physiological role of bile includes the facilitation of dispersion and absorption of lipids and fat-soluble vitamins (see e.g., Malmsten, M. Surfactants and polymers in drug delivery, Informa Health Care, New York, NY, 2002; Brunton, Chapter 38 in: Goodman & Gilman's The Pharmacological Basis of Therapeutics, 9th Ed., Hardman et al. Eds., McGraw-Hill, New York, 1996, pp. 934-935). Various natural bile salts, and their synthetic derivatives, act as penetration enhancers. Thus, the term “bile salts” includes any of the naturally occurring components of bile as well as any of their synthetic derivatives. Suitable bile salts include, for example, cholic acid (or its pharmaceutically acceptable sodium salt, sodium cholate), dehydrocholic acid (sodium dehydrocholate), deoxycholic acid (sodium deoxycholate), glucholic acid (sodium glucholate), glycholic acid (sodium glycocholate), glycodeoxycholic acid (sodium glycodeoxycholate), taurocholic acid (sodium taurocholate), taurodeoxycholic acid (sodium taurodeoxycholate), chenodeoxycholic acid (sodium chenodeoxycholate), ursodeoxycholic acid (UDCA), sodium tauro-24,25-dihydro-fusidate (STDHF), sodium glycodihydrofusidate and polyoxyethylene-9-lauryl ether (POE) (see e.g., Malmsten, M. Surfactants and polymers in drug delivery, Informa Health Care, New York, NY, 2002; Lee et al., Critical Reviews in Therapeutic Drug Carrier Systems, 1991, page 92; Swinyard, Chapter 39 In: Remington's Pharmaceutical Sciences, 18th Ed., Gennaro, ed., Mack Publishing Co., Easton, Pa., 1990, pages 782-783; Muranishi, Critical Reviews in Therapeutic Drug Carrier Systems, 1990, 7, 1-33; Yamamoto et al., J. Pharm. Exp. Ther., 1992, 263, 25; Yamashita et al., J. Pharm. Sci., 1990, 79, 579-583).

[0585] Chelating Agents: Chelating agents, as used in connection with the present disclosure, can be defined as compounds that remove metallic ions from solution by forming complexes therewith, with the result that absorption of iRNAs through the mucosa is enhanced. With regards to their use as penetration enhancers in the present disclosure, chelating agents have the added advantage of also serving as DNase inhibitors, as most characterized DNA nucleases require a divalent metal ion for catalysis and are thus inhibited by chelating agents (Jarrett, J. Chromatogr., 1993, 618, 315-339). Suitable chelating agents include but are not limited to disodium ethylenediaminetetraacetate (EDTA), citric acid, salicylates (e.g., sodium salicylate, 5-methoxysalicylate and homovanilate), N-acyl derivatives of collagen, laureth-9 and N-amino acyl derivatives of β-diketones (enamines)(see e.g., Katdare, A. et al., Excipient development for pharmaceutical, biotechnology, and drug delivery, CRC Press, Danvers, M A, 2006; Lee et al., Critical Reviews in Therapeutic Drug Carrier Systems, 1991, page 92; Muranishi, Critical Reviews in Therapeutic Drug Carrier Systems, 1990, 7, 1-33; Buur et al., J. Control Rel., 1990, 14,43-51).

[0586] Non-chelating non-surfactants: As used herein, non-chelating non-surfactant penetration enhancing compounds can be defined as compounds that demonstrate insignificant activity as chelating agents or as surfactants but that nonetheless enhance absorption of iRNAs through the alimentary mucosa (see e.g., Muranishi, Critical Reviews in Therapeutic Drug Carrier Systems, 1990, 7, 1-33). This class of penetration enhancers include, for example, unsaturated cyclic ureas, 1-alkyl- and 1-alkenylazacyclo-alkanone derivatives (Lee et al., Critical Reviews in Therapeutic Drug Carrier Systems, 1991, page 92); and non-steroidal anti-inflammatory agents such as diclofenac sodium, indomethacin and phenylbutazone (Yamashita et al., J. Pharm. Pharmacol., 1987, 39, 621-626).

[0587] Agents that enhance uptake of iRNAs at the cellular level may also be added to the pharmaceutical and other compositions of the present disclosure. For example, cationic lipids, such as lipofectin (Junichi et al, U.S. Pat. No. 5,705,188), cationic glycerol derivatives, and polycationic molecules, such as polylysine (Lollo et al., PCT Application WO 97/30731), are also known to enhance the cellular uptake of dsRNAs. Examples of commercially available transfection reagents include, for example Lipofectamine™ (Invitrogen; Carlsbad, CA), Lipofectamine 2000™ (Invitrogen; Carlsbad, CA), 293fectin™ (Invitrogen; Carlsbad, CA), Cellfectin™ (Invitrogen; Carlsbad, CA), DMRIE-C™ (Invitrogen; Carlsbad, CA), FreeStyle™ MAX (Invitrogen; Carlsbad, CA), Lipofectamine™ 2000 CD (Invitrogen; Carlsbad, CA), Lipofectamine™ (Invitrogen; Carlsbad, CA), RNAiMAX (Invitrogen; Carlsbad, CA), Oligofectamine™ (Invitrogen; Carlsbad, CA), Optifect™ (Invitrogen; Carlsbad, CA), X-tremeGENE Q2 Transfection Reagent (Roche; Grenzacherstrasse, Switzerland), DOTAP Liposomal Transfection Reagent (Grenzacherstrasse, Switzerland), DOSPER Liposomal Transfection Reagent (Grenzacherstrasse, Switzerland), or Fugene (Grenzacherstrasse, Switzerland), Transfectam® Reagent (Promega; Madison, WI), TransFast™ Transfection Reagent (Promega; Madison, WI), Tfx™-20 Reagent (Promega; Madison, WI), Tfx™-50 Reagent (Promega; Madison, WI), DreamFect™ (OZ Biosciences; Marseille, France), EcoTransfect (OZ Biosciences; Marseille, France), TransPass™ D1 Transfection Reagent (New England Biolabs; Ipswich, MA, USA), LyoVec™/LipoGen™ (Invivogen; San Diego, CA, USA), PerFectin Transfection Reagent (Genlantis; San Diego, CA, USA), NeuroPORTER Transfection Reagent (Genlantis; San Diego, CA, USA), GenePORTER Transfection reagent (Genlantis; San Diego, CA, USA), GenePORTER 2 Transfection reagent (Genlantis; San Diego, CA, USA), Cytofectin Transfection Reagent (Genlantis; San Diego, CA, USA), BaculoPORTER Transfection Reagent (Genlantis; San Diego, CA, USA), TroganPORTER™ transfection Reagent (Genlantis; San Diego, CA, USA), RiboFect (Bioline; Taunton, MA, USA), PlasFect (Bioline; Taunton, MA, USA), UniFECTOR (B-Bridge International; Mountain View, CA, USA), SureFECTOR (B-Bridge International; Mountain View, CA, USA), or HiFect™ (B-Bridge International, Mountain View, CA, USA), among others.

[0588] Other agents may be utilized to enhance the penetration of the administered nucleic acids, including glycols such as ethylene glycol and propylene glycol, pyrrols such as 2-pyrrol, azones, and terpenes such as limonene and menthone.

iii. Carriers

[0589] Certain compositions of the present disclosure also incorporate carrier compounds in the formulation. As used herein, “carrier compound” can refer to a nucleic acid, or analog thereof, which is inert (i.e., does not possess biological activity per se) but is recognized as a nucleic acid by in vivo processes that reduce the bioavailability of a nucleic acid having biological activity by, for example, degrading the biologically active nucleic acid or promoting its removal from circulation. The coadministration of a nucleic acid and a carrier compound, typically with an excess of the latter substance, can result in a substantial reduction of the amount of nucleic acid recovered in the liver, kidney or other extracirculatory reservoirs, presumably due to competition between the carrier compound and the nucleic acid for a common receptor. For example, the recovery of a partially phosphorothioate dsRNA in hepatic tissue can be reduced when it is coadministered with polyinosinic acid, dextran sulfate, polycytidic acid or 4-acetamido-4′isothiocyano-stilbene-2,2′-disulfonic acid (Miyao et al., DsRNA Res. Dev., 1995, 5, 115-121; Takakura et al., DsRNA & Nucl. Acid Drug Dev., 1996, 6, 177-183).

iv. Excipients

[0590] In contrast to a carrier compound, a pharmaceutical carrier or excipient may comprise, e.g., a pharmaceutically acceptable solvent, suspending agent or any other pharmacologically inert vehicle for delivering one or more nucleic acids to an animal. The excipient may be liquid or solid and is selected, with the planned manner of administration in mind, so as to provide for the desired bulk, consistency, etc., when combined with a nucleic acid and the other components of a given pharmaceutical composition. Typical pharmaceutical carriers include, but are not limited to, binding agents (e.g., pregelatinized maize starch, polyvinylpyrrolidone or hydroxypropyl methylcellulose, etc.); fillers (e.g., lactose and other sugars, microcrystalline cellulose, pectin, gelatin, calcium sulfate, ethyl cellulose, polyacrylates or calcium hydrogen phosphate, etc.); lubricants (e.g., magnesium stearate, talc, silica, colloidal silicon dioxide, stearic acid, metallic stearates, hydrogenated vegetable oils, corn starch, polyethylene glycols, sodium benzoate, sodium acetate, etc.); disintegrants (e.g., starch, sodium starch glycolate, etc.); and wetting agents (e.g., sodium lauryl sulphate, etc).

[0591] Pharmaceutically acceptable organic or inorganic excipients suitable for non-parenteral administration which do not deleteriously react with nucleic acids can also be used to formulate the compositions of the present disclosure. Suitable pharmaceutically acceptable carriers include, but are not limited to, water, salt solutions, alcohols, polyethylene glycols, gelatin, lactose, amylose, magnesium stearate, talc, silicic acid, viscous paraffin, hydroxymethylcellulose, polyvinylpyrrolidone and the like.

[0592] Formulations for topical administration of nucleic acids may include sterile and non-sterile aqueous solutions, non-aqueous solutions in common solvents such as alcohols, or solutions of the nucleic acids in liquid or solid oil bases. The solutions may also contain buffers, diluents and other suitable additives. Pharmaceutically acceptable organic or inorganic excipients suitable for non-parenteral administration which do not deleteriously react with nucleic acids can be used.

[0593] Suitable pharmaceutically acceptable excipients include, but are not limited to, water, salt solutions, alcohol, polyethylene glycols, gelatin, lactose, amylose, magnesium stearate, talc, silicic acid, viscous paraffin, hydroxymethylcellulose, polyvinylpyrrolidone and the like.

v. Other Components

[0594] The compositions of the present disclosure may additionally contain other adjunct components conventionally found in pharmaceutical compositions, e.g., at their art-established usage levels. Thus, for example, the compositions may contain additional, compatible, pharmaceutically-active materials such as, for example, antipruritics, astringents, local anesthetics or anti-inflammatory agents, or may contain additional materials useful in physically formulating various dosage forms of the compositions of the present disclosure, such as dyes, flavoring agents, preservatives, antioxidants, opacifiers, thickening agents and stabilizers. However, such materials, when added, should not unduly interfere with the biological activities of the components of the compositions of the present disclosure. The formulations can be sterilized and, if desired, mixed with auxiliary agents, e.g., lubricants, preservatives, stabilizers, wetting agents, emulsifiers, salts for influencing osmotic pressure, buffers, colorings, flavorings and/or aromatic substances and the like which do not deleteriously interact with the nucleic acid(s) of the formulation.

[0595] Aqueous suspensions may contain substances that increase the viscosity of the suspension including, for example, sodium carboxymethylcellulose, sorbitol and/or dextran. The suspension may also contain stabilizers.

[0596] In some embodiments, pharmaceutical compositions featured in the disclosure include (a) one or more iRNA compounds and (b) one or more biologic agents which function by a non-RNAi mechanism. Examples of such biologic agents include agents that interfere with an interaction of MYOC and at least one MYOC binding partner.

[0597] Toxicity and therapeutic efficacy of such compounds can be determined by standard pharmaceutical procedures in cell cultures or experimental animals, e.g., for determining the LD50 (the dose lethal to 50% of the population) and the ED50 (the dose therapeutically effective in 50% of the population). The dose ratio between toxic and therapeutic effects is the therapeutic index and it can be expressed as the ratio LD50/ED50. Compounds that exhibit high therapeutic indices are typical.

[0598] The data obtained from cell culture assays and animal studies can be used in formulating a range of dosage for use in humans. The dosage of compositions featured in the disclosure lies generally within a range of circulating concentrations that include the ED50 with little or no toxicity. The dosage may vary within this range depending upon the dosage form employed and the route of administration utilized. For any compound used in the methods featured in the disclosure, the therapeutically effective dose can be estimated initially from cell culture assays. A dose may be formulated in animal models to achieve a circulating plasma concentration range of the compound or, when appropriate, of the polypeptide product of a target sequence (e.g., achieving a decreased concentration of the polypeptide) that includes the IC50 (i.e., the concentration of the test compound which achieves a half-maximal inhibition of symptoms) as determined in cell culture. Such information can be used to more accurately determine useful doses in humans. Levels in plasma may be measured, for example, by high performance liquid chromatography.

[0599] In addition to their administration, as discussed above, the iRNAs featured in the disclosure can be administered in combination with other known agents effective in treatment of diseases or disorders related to MYOC expression (e.g., glaucoma, e.g., primary open angle glaucoma (POAG)). In any event, the administering physician can adjust the amount and timing of iRNA administration on the basis of results observed using standard measures of efficacy known in the art or described herein.

### VII. METHODS OF TREATING DISORDERS RELATED TO EXPRESSION OF MYOC

[0600] The present disclosure relates to the use of an iRNA targeting MYOC to inhibit MYOC expression and/or to treat a disease, disorder, or pathological process that is related to MYOC expression (e.g., glaucoma, e.g., primary open angle glaucoma (POAG)).

[0601] In some aspects, a method of treatment of a disorder related to expression of MYOC is provided, the method comprising administering an iRNA (e.g., a dsRNA) disclosed herein to a subject in need thereof. In some embodiments, the iRNA inhibits (decreases) MYOC expression.

[0602] In some embodiments, the subject is an animal that serves as a model for a disorder related to MYOC expression, e.g., glaucoma, e.g., primary open angle glaucoma (POAG). .

### A. Glaucoma

[0603] In some embodiments, the disorder related to MYOC expression is glaucoma. A non-limiting example of glaucoma that is treatable using the method described herein includes primary open angle glaucoma (POAG).

[0604] Clinical and pathological features of glaucoma include, but are not limited to, vision loss, a reduction in visual acuity (e.g., halos around lights and blurriness)) and decreased leakage of aqueous humor from the eye.

[0605] In some embodiments, the subject with glaucoma is less than 18 years old. In some embodiments, the subject with glaucoma is an adult. In some embodiments, the subject with glaucoma is more than 60 years old. In some embodiments, the subject has, or is identified as having, elevated levels of MYOC mRNA or protein relative to a reference level (e.g., a level of MYOC that is greater than a reference level).

[0606] In some embodiments, glaucoma is diagnosed using analysis of a sample from the subject (e.g., an aqueous ocular fluid sample). In some embodiments, the sample is analyzed using a method selected from one or more of: fluorescent in situ hybridization (FISH), immunohistochemistry, MYOC immunoassay, electron microscopy, laser microdissection, and mass spectrometry. In some embodiments, glaucoma is diagnosed using any suitable diagnostic test or technique, e.g., Goldmann Applanation Tonometry, measurement of central corneal thickness (CCT), automated static threshold perimetry (e.g. Humphrey field analysis), Van Herick technique, gonioscopy, ultrasound biomicroscopy and anterior segment optical coherence tomography (AS-OCT), angiography (e.g., fluorescein angiography or indocyanine green angiography), electroretinography, ultrasonography, pachymetry, optical coherence tomography (OCT), computed tomography (CT) and magnetic resonance imaging (MRI), tonometry, color vision testing, visual field testing, slit-lamp examination, ophthalmoscopy, and physical examination (e.g., to assess visual acuity (e.g., by fundoscopy or optical coherence tomography (OCT)).

### B. Combination Therapies

[0607] In some embodiments, an iRNA (e.g., a dsRNA) disclosed herein is administered in combination with a second therapy (e.g., one or more additional therapies) known to be effective in treating a disorder related to MYOC expression (glaucoma, e.g., primary open angle glaucoma (POAG)) or a symptom of such a disorder. The iRNA may be administered before, after, or concurrent with the second therapy. In some embodiments, the iRNA is administered before the second therapy. In some embodiments, the iRNA is administered after the second therapy. In some embodiments, the iRNA is administered concurrent with the second therapy.

[0608] The second therapy may be an additional therapeutic agent. The iRNA and the additional therapeutic agent can be administered in combination in the same composition or the additional therapeutic agent can be administered as part of a separate composition.

[0609] In some embodiments, the second therapy is a non-iRNA therapeutic agent that is effective to treat the disorder or symptoms of the disorder.

[0610] In some embodiments, the iRNA is administered in conjunction with a therapy.

[0611] Exemplary combination therapies include, but are not limited to, laser trabeculoplasty surgery, trabeculectomy surgery, a minimally invasive glaucoma surgery, placement of a drainage tube in the eye, oral medication or eye drops.

### Administration Dosages, Routes, and Timing

[0612] A subject (e.g., a human subject, e.g., a patient) can be administered a therapeutic amount of iRNA. The therapeutic amount can be, e.g., 0.05-50 mg/kg.

[0613] In some embodiments, the iRNA is formulated for delivery to a target organ, e.g., to the eye.

[0614] In some embodiments, the iRNA is formulated as a lipid formulation, e.g., an LNP formulation as described herein. In some such embodiments, the therapeutic amount is 0.05-5 mg/kg dsRNA. In some embodiments, the lipid formulation, e.g., LNP formulation, is administered intravenously.

[0615] In some embodiments, the iRNA is in the form of a GalNAc conjugate e.g., as described herein. In some such embodiments, the therapeutic amount is 0.5-50 mg dsRNA. In some embodiments, the e.g., GalNAc conjugate is administered subcutaneously.

[0616] In some embodiments, the administration is repeated, for example, on a regular basis, such as, daily, biweekly (i.e., every two weeks) for one month, two months, three months, four months, six months or longer. After an initial treatment regimen, the treatments can be administered on a less frequent basis. For example, after administration biweekly for three months, administration can be repeated once per month, for six months or a year or longer. In some embodiments, the iRNA agent is administered in two or more doses. In some embodiments, the number or amount of subsequent doses is dependent on the achievement of a desired effect, e.g., to(a) inhibit or reduce the expression or activity of MYOC; (b) reduce the level of misfolded MYOC protein; (c) reduce trabecular meshwork cell death; (d) decrease intraocular pressure; or (e) increase visual acuity, or the achievement of a therapeutic or prophylactic effect, e.g., reduction or prevention of one or more symptoms associated with the disorder.

[0617] In some embodiments, the iRNA agent is administered according to a schedule. For example, the iRNA agent may be administered once per week, twice per week, three times per week, four times per week, or five times per week. In some embodiments, the schedule involves regularly spaced administrations, e.g., hourly, every four hours, every six hours, every eight hours, every twelve hours, daily, every 2 days, every 3 days, every 4 days, every 5 days, weekly, biweekly, or monthly. In some embodiments, the iRNA agent is administered at the frequency required to achieve a desired effect.

[0618] In some embodiments, the schedule involves closely spaced administrations followed by a longer period of time during which the agent is not administered. For example, the schedule may involve an initial set of doses that are administered in a relatively short period of time (e.g., about every 6 hours, about every 12 hours, about every 24 hours, about every 48 hours, or about every 72 hours) followed by a longer time period (e.g., about 1 week, about 2 weeks, about 3 weeks, about 4 weeks, about 5 weeks, about 6 weeks, about 7 weeks, or about 8 weeks) during which the iRNA agent is not administered. In some embodiments, the iRNA agent is initially administered hourly and is later administered at a longer interval (e.g., daily, weekly, biweekly, or monthly). In some embodiments, the iRNA agent is initially administered daily and is later administered at a longer interval (e.g., weekly, biweekly, or monthly). In certain embodiments, the longer interval increases overtime or is determined based on the achievement of a desired effect.

[0619] Before administration of a full dose of the iRNA, patients can be administered a smaller dose, such as a 5% infusion dose, and monitored for adverse effects, such as an allergic reaction, or for elevated lipid levels or blood pressure. In another example, the patient can be monitored for unwanted effects.

### VIII. METHODS FOR MODULATING EXPRESSION OF MYOC

[0620] In some aspects, the disclosure provides a method for modulating (e.g., inhibiting or activating) the expression of MYOC, e.g., in a cell, in a tissue, or in a subject. In some embodiments, the cell or tissue is ex vivo, in vitro, or in vivo. In some embodiments, the cell or tissue is in the eye (e.g., a trabecular meshwork tissue, a ciliary body, a retinal pigment epithelium (RPE), a retinal tissue, an astrocyte, a pericyte, a Müller cell, a ganglion cell, an endothelial cell, a photoreceptor cell, a retinal blood vessel (e.g., including endothelial cells and vascular smooth muscle cells), or choroid tissue, e.g., a choroid vessel). In some embodiments, the cell or tissue is in a subject (e.g., a mammal, such as, for example, a human). In some embodiments, the subject (e.g., the human) is at risk, or is diagnosed with a disorder related to expression of MYOC expression, as described herein.

[0621] In some embodiments, the method includes contacting the cell with an iRNA as described herein, in an amount effective to decrease the expression of MYOC in the cell. In some embodiments, contacting a cell with an RNAi agent includes contacting a cell in vitro with the RNAi agent or contacting a cell in vivo with the RNAi agent. In some embodiments, the RNAi agent is put into physical contact with the cell by the individual performing the method, or the RNAi agent may be put into a situation that will permit or cause it to subsequently come into contact with the cell. Contacting a cell in vitro may be done, for example, by incubating the cell with the RNAi agent. Contacting a cell in vivo may be done, for example, by injecting the RNAi agent into or near the tissue where the cell is located, or by injecting the RNAi agent into another area, e.g., ocular tissue. For example, the RNAi agent may contain or be coupled to a ligand, e.g., a lipophilic moiety or moieties as described below and further detailed, e.g., in PCT/US2019/031170 which is incorporated herein by reference in its entirety, including the passages therein describing lipophilic moieties, that directs or otherwise stabilizes the RNAi agent at a site of interest. Combinations of in vitro and in vivo methods of contacting are also possible. For example, a cell may also be contacted in vitro with an RNAi agent and subsequently transplanted into a subject.

[0622] The expression of MYOC may be assessed based on the level of expression of MYOC mRNA, MYOC protein, or the level of another parameter functionally linked to the level of expression of MYOC. In some embodiments, the expression of MYOC is inhibited by at least 5%, at least 10%, at least 15%, at least 20%, at least 25%, at least 30%, at least 35%, at least 40%, at least 45%, at least 50%, at least 55%, at least 60%, at least 65%, at least 70%, at least 75%, at least 80%, at least 85%, at least 90%, or at least 95%. In some embodiments, the iRNA has an IC₅₀ in the range of 0.001-0.01 nM, 0.001-0.10 nM, 0.001-1.0 nM, 0.001-10 nM, 0.01-0.05 nM, 0.01-0.50 nM, 0.02-0.60 nM, 0.01-1.0 nM, 0.01-1.5 nM, 0.01-10 nM. The IC₅₀ value may be normalized relative to an appropriate control value, e.g., the IC₅₀ of a non-targeting iRNA.

[0623] In some embodiments, the method includes introducing into the cell or tissue an iRNA as described herein and maintaining the cell or tissue for a time sufficient to obtain degradation of the mRNA transcript of MYOC, thereby inhibiting the expression of MYOC in the cell or tissue.

[0624] In some embodiments, the method includes administering a composition described herein, e.g., a composition comprising an iRNA that binds MYOC, to the mammal such that expression of the target MYOC is decreased, such as for an extended duration, e.g., at least two, three, four days or more, e.g., one week, two weeks, three weeks, or four weeks or longer. In some embodiments, the decrease in expression of MYOC is detectable within 1 hour, 2 hours, 4 hours, 8 hours, 12 hours, or 24 hours of the first administration.

[0625] In some embodiments, the method includes administering a composition as described herein to a mammal such that expression of the target MYOC is increased by e.g., at least 10% compared to an untreated animal. In some embodiments, the activation of MYOC occurs over an extended duration, e.g., at least two, three, four days or more, e.g., one week, two weeks, three weeks, four weeks, or more. Without wishing to be bound by theory, an iRNA can activate MYOC expression by stabilizing the MYOC mRNA transcript, interacting with a promoter in the genome, or inhibiting an inhibitor of MYOC expression.

[0626] The iRNAs useful for the methods and compositions featured in the disclosure specifically target RNAs (primary or processed) of MYOC. Compositions and methods for inhibiting the expression of MYOC using iRNAs can be prepared and performed as described elsewhere herein.

[0627] In some embodiments, the method includes administering a composition containing an iRNA, where the iRNA includes a nucleotide sequence that is complementary to at least a part of an RNA transcript of MYOC of the subject, e.g., the mammal, e.g., the human, to be treated. The composition may be administered by any appropriate means known in the art including, but not limited to ocular (e.g., intraocular), topical, and intravenous administration.

[0628] In certain embodiments, the composition is administered intraocularly (e.g., by intravitreal administration, e.g., intravitreal injection; transscleral administration, e.g., transscleral injection; subconjunctival administration, e.g., subconjunctival injection; retrobulbar administration, e.g., retrobulbar injection; intracameral administration, e.g., intracameral injection; or subretinal administration, e.g., subretinal injection. In other embodiments, the composition is administered topically. In other embodiments, the composition is administered by intravenous infusion or injection.

[0629] In certain embodiments, the composition is administered by intravenous infusion or injection. In some such embodiments, the composition comprises a lipid formulated siRNA (e.g., an LNP formulation, such as an LNP 11 formulation) for intravenous infusion.

[0630] Unless otherwise defined, all technical and scientific terms used herein have the same meaning as commonly understood by one of ordinary skill in the art to which this disclosure belongs. Although methods and materials similar or equivalent to those described herein can be used in the practice or testing of the iRNAs and methods featured in the disclosure, suitable methods and materials are described below. All publications, patent applications, patents, and other references mentioned herein are incorporated by reference in their entirety. In case of conflict, the present specification, including definitions, will control. In addition, the materials, methods, and examples are illustrative only and not intended to be limiting.

### SPECIFIC EMBODIMENTS

[0631] 1. A double stranded ribonucleic acid (dsRNA) agent for inhibiting expression of myocilin (MYOC), wherein the dsRNA agent comprises a sense strand and an antisense strand forming a double stranded region, wherein the sense strand comprises a nucleotide sequence comprising at least 15 contiguous nucleotides, with 0, 1, 2, or 3 mismatches, of a portion of a coding strand of human MYOC and the antisense strand comprises a nucleotide sequence comprising at least 15 contiguous nucleotides, with 0, 1, 2, or 3 mismatches, of the corresponding portion of a non-coding strand of human MYOC such that the sense strand is complementary to the at least 15 contiguous nucleotides in the antisense strand.
[0632] 2. The dsRNA agent of embodiment 1, wherein the coding strand of human MYOC comprises the sequence SEQ ID NO: 1.
[0633] 3. The dsRNA agent of embodiment 1 or 2, wherein the non-coding strand of human MYOC comprises the sequence of SEQ ID NO: 2.
[0634] 4. A double stranded ribonucleic acid (dsRNA) agent for inhibiting expression of MYOC, wherein the dsRNA agent comprises a sense strand and an antisense strand forming a double stranded region, wherein the antisense strand comprises a nucleotide sequence comprising at least 15 contiguous nucleotides, with 0, 1, 2, or 3 mismatches, of a portion of nucleotide sequence of SEQ ID NO: 2 such that the sense strand is complementary to the at least 15 contiguous nucleotides in the antisense strand.
[0635] 5. The dsRNA agent of embodiment 4, wherein the sense strand comprises a nucleotide sequence comprising at least 15 contiguous nucleotides, with 0, or 1, 2, or 3 mismatches, of the corresponding portion of the nucleotide sequence of SEQ ID NO: 1.
[0636] 5a. The dsRNA agent of any of the preceding embodiments, wherein the antisense strand comprises a nucleotide sequence comprising at least 15 contiguous nucleotides, with 0, 1, 2, or 3 mismatches, from the antisense strand nucleotide sequence of duplex AD-1565804 and the sense strand comprises a nucleotide sequence comprising at least 15 contiguous nucleotides, with 0, 1, 2, or 3 mismatches, from the sense strand nucleotide sequence of duplex AD-1565804.
[0637] 5b. The dsRNA agent of any of the preceding embodiments, wherein the antisense strand comprises a nucleotide sequence comprising at least 15 contiguous nucleotides, with 0, 1, 2, or 3 mismatches, from the antisense strand nucleotide sequence of duplex AD-1565837 and the sense strand comprises a nucleotide sequence comprising at least 15 contiguous nucleotides, with 0, 1, 2, or 3 mismatches, from the sense strand nucleotide sequence of duplex AD-1565837.
[0638] 6. The dsRNA of any of the preceding embodiments, wherein the dsRNA agent comprises a sense strand and an antisense strand, wherein the antisense strand comprises a nucleotide sequence comprising at least 17 contiguous nucleotides, with 0, 1, 2, or 3 mismatches, of a portion of nucleotide sequence of SEQ ID NO: 2 such that the sense strand is complementary to the at least 17 contiguous nucleotides in the antisense strand.
[0639] 7. The dsRNA of embodiment 6, wherein the sense strand comprises a nucleotide sequence comprising at least 17 contiguous nucleotides, with 0, or 1, 2, or 3 mismatches, of the corresponding portion of the nucleotide sequence of SEQ ID NO: 1.
[0640] 8. The dsRNA of any of the preceding embodiments, wherein the dsRNA agent comprises a sense strand and an antisense strand, wherein the antisense strand comprises a nucleotide sequence comprising at least 19 contiguous nucleotides, with 0, 1, 2, or 3 mismatches, of a portion of nucleotide sequence of SEQ ID NO: 2 such that the sense strand is complementary to the at least 19 contiguous nucleotides in the antisense strand.
[0641] 9. The dsRNA of embodiment 8, wherein the sense strand comprises a nucleotide sequence comprising at least 19 contiguous nucleotides, with 0, 1, 2, or 3 mismatches, of the corresponding portion of the nucleotide sequence of SEQ ID NO: 1.
[0642] 10. The dsRNA of any of the preceding embodiments, wherein the dsRNA agent comprises a sense strand and an antisense strand, wherein the antisense strand comprises a nucleotide sequence comprising at least 21 contiguous nucleotides, with 0, 1, 2, or 3 mismatches, of a portion of nucleotide sequence of SEQ ID NO: 2 such that the sense strand is complementary to the at least 21 contiguous nucleotides in the antisense strand.
[0643] 11. The dsRNA of embodiment 10, wherein the sense strand comprises a nucleotide sequence comprising at least 21 contiguous nucleotides, with 0, or 1, 2, or 3 mismatches, of the corresponding portion of the nucleotide sequence of SEQ ID NO: 1.
[0644] 12. The dsRNA agent of any one of the preceding embodiments, wherein the portion of the sense strand is a portion within a sense strand in any one of Tables 2A and 2B.
[0645] 13. The dsRNA agent of any one of the preceding embodiments, wherein the portion of the antisense strand is a portion within an antisense strand in any one of Tables 2A and 2B.
[0646] 14. The dsRNA agent of any of the preceding embodiments, wherein the antisense strand comprises a nucleotide sequence comprising at least 15 contiguous nucleotides, with 0, 1, 2, or 3 mismatches, from one of the antisense sequences listed in any one of Tables 2A and 2B.
[0647] 15. The dsRNA agent of any of the preceding embodiments, wherein the sense strand comprises a nucleotide sequence comprising at least 15 contiguous nucleotides, with 0, 1, 2, or 3 mismatches, from a sense sequence listed in any one of Tables 2A and 2B that corresponds to the antisense sequence.
[0648] 16. The dsRNA agent of any of the preceding embodiments, wherein the antisense strand comprises a nucleotide sequence comprising at least 17 contiguous nucleotides, with 0, 1, 2, or 3 mismatches, from one of the antisense sequences listed in any one of Tables 2A and 2B.
[0649] 17. The dsRNA agent of any of the preceding embodiments, wherein the sense strand comprises a nucleotide sequence comprising at least 17 contiguous nucleotides, with 0, 1, 2, or 3 mismatches, from a sense sequence listed in any one of Tables 2A and 2B that corresponds to the antisense sequence.
[0650] 18. The dsRNA agent of any of the preceding embodiments, wherein the antisense strand comprises a nucleotide sequence comprising at least 19 contiguous nucleotides, with 0, 1, 2, or 3 mismatches, from one of the antisense sequences listed in any one of Tables 2A and 2B.
[0651] 19. The dsRNA agent of any of the preceding embodiments, wherein the sense strand comprises a nucleotide sequence comprising at least 19 contiguous nucleotides, with 0, 1, 2, or 3 mismatches, from a sense sequence listed in any one of Tables 2A and 2B that corresponds to the antisense sequence.
[0652] 20. The dsRNA agent of any of the preceding embodiments, wherein the antisense strand comprises a nucleotide sequence comprising at least 21 contiguous nucleotides, with 0,1, 2, or 3 mismatches, from one of the antisense sequences listed in any one of Tables 2A and 2B.
[0653] 21. The dsRNA agent of any of the preceding embodiments, wherein the sense strand comprises a nucleotide sequence comprising at least 21 contiguous nucleotides, with 0, 1, 2, or 3 mismatches, from a sense sequence listed in any one of Tables 2A and 2B that corresponds to the antisense sequence.
[0654] 22. The dsRNA agent of any of the preceding embodiments, wherein the sense strand is at least 23 nucleotides in length, e.g., 23-30 nucleotides in length.
[0655] 23. The dsRNA agent of any of the preceding embodiments, wherein at least one of the sense strand and the antisense strand is conjugated to one or more lipophilic moieties.
[0656] 24. The dsRNA agent of embodiment 23, wherein the lipophilic moiety is conjugated to one or more positions in the double stranded region of the dsRNA agent.
[0657] 25. The dsRNA agent of embodiment 23 or 24, wherein the lipophilic moiety is conjugated via a linker or carrier.
[0658] 26. The dsRNA agent of any one of embodiments 23-25, wherein lipophilicity of the lipophilic moiety, measured by logKow, exceeds 0.
[0659] 27. The dsRNA agent of any one of the preceding embodiments, wherein the hydrophobicity of the double-stranded RNAi agent, measured by the unbound fraction in a plasma protein binding assay of the double-stranded RNAi agent, exceeds 0.2.
[0660] 28. The dsRNA agent of embodiment 27, wherein the plasma protein binding assay is an electrophoretic mobility shift assay using human serum albumin protein.
[0661] 29. The dsRNA agent of any of the preceding embodiments, wherein the dsRNA agent comprises at least one modified nucleotide.
[0662] 30. The dsRNA agent of embodiment 29, wherein no more than five of the sense strand nucleotides and not more than five of the nucleotides of the antisense strand are unmodified nucleotides.
[0663] 31. The dsRNA agent of embodiment 29, wherein all of the nucleotides of the sense strand and all of the nucleotides of the antisense strand comprise a modification.
[0664] 32. The dsRNA agent of any one of embodiments 29-31, wherein at least one of the modified nucleotides is selected from the group consisting of a deoxy-nucleotide, a 3′-terminal deoxy-thymine (dT) nucleotide, a 2′-O-methyl modified nucleotide, a 2′-fluoro modified nucleotide, a 2′-deoxy-modified nucleotide, a locked nucleotide, an unlocked nucleotide, a conformationally restricted nucleotide, a constrained ethyl nucleotide, an abasic nucleotide, a 2′-amino-modified nucleotide, a 2′-O-allyl-modified nucleotide, 2′-C-alkyl-modified nucleotide, a 2′-methoxyethyl modified nucleotide, a 2′-O-alkyl-modified nucleotide, a morpholino nucleotide, a phosphoramidate, a non-natural base comprising nucleotide, a tetrahydropyran modified nucleotide, a 1,5-anhydrohexitol modified nucleotide, a cyclohexenyl modified nucleotide, a nucleotide comprising a phosphorothioate group, a nucleotide comprising a methylphosphonate group, a nucleotide comprising a 5′-phosphate, a nucleotide comprising a 5′-phosphate mimic, a glycol modified nucleotide, and a 2-O—(N-methylacetamide) modified nucleotide; and combinations thereof.
[0665] 33. The dsRNA agent of any of embodiments 29-31, wherein no more than five of the sense strand nucleotides and not more than five of the nucleotides of the antisense strand include modifications other than 2′-O-methyl modified nucleotide, a 2′-fluoro modified nucleotide, a 2′-deoxy-modified nucleotide, unlocked nucleic acids (UNA) or glycerol nucleic acid (GNA).
[0666] 34. The dsRNA agent of any of the preceding embodiments, which comprises a non-nucleotide spacer (wherein optionally the non-nucleotide spacer comprises a C3-C6 alkyl) between two of the contiguous nucleotides of the sense strand or between two of the contiguous nucleotides of the antisense strand.
[0667] 35. The dsRNA agent of any of the preceding embodiments, wherein each strand is no more than 30 nucleotides in length.
[0668] 36. The dsRNA agent of any of the preceding embodiments, wherein at least one strand comprises a 3′ overhang of at least 1 nucleotide.
[0669] 37. The dsRNA agent of any of the preceding embodiments, wherein at least one strand comprises a 3′ overhang of at least 2 nucleotides.
[0670] 38. The dsRNA agent of any of the preceding embodiments, wherein the double stranded region is 15-30 nucleotide pairs in length.
[0671] 39. The dsRNA agent of embodiment 38, wherein the double stranded region is 17-23 nucleotide pairs in length.
[0672] 40. The dsRNA agent of embodiment 38, wherein the double stranded region is 17-25 nucleotide pairs in length.
[0673] 41. The dsRNA agent of embodiment 38, wherein the double stranded region is 23-27 nucleotide pairs in length.
[0674] 42. The dsRNA agent of embodiment 38, wherein the double stranded region is 19-21 nucleotide pairs in length.
[0675] 43. The dsRNA agent of embodiment 38, wherein the double stranded region is 21-23 nucleotide pairs in length.
[0676] 44. The dsRNA agent of any of the preceding embodiments, wherein each strand has 19-30 nucleotides.
[0677] 45. The dsRNA agent of any of the preceding embodiments, wherein each strand has 19-23 nucleotides.
[0678] 46. The dsRNA agent of any of the preceding embodiments, wherein each strand has 21-23 nucleotides.
[0679] 47. The dsRNA agent of any of the preceding embodiments, wherein the agent comprises at least one phosphorothioate or methylphosphonate internucleotide linkage.
[0680] 48. The dsRNA agent of embodiment 47, wherein the phosphorothioate or methylphosphonate internucleotide linkage is at the 3′-terminus of one strand.
[0681] 49. The dsRNA agent of embodiment 48, wherein the strand is the antisense strand.
[0682] 50. The dsRNA agent of embodiment 48, wherein the strand is the sense strand.
[0683] 51. The dsRNA agent of embodiment 47, wherein the phosphorothioate or methylphosphonate internucleotide linkage is at the 5′-terminus of one strand.
[0684] 52. The dsRNA agent of embodiment 51, wherein the strand is the antisense strand.
[0685] 53. The dsRNA agent of embodiment 51, wherein the strand is the sense strand.
[0686] 54. The dsRNA agent of embodiment 47, wherein each of the 5′- and 3′-terminus of one strand comprises a phosphorothioate or methylphosphonate internucleotide linkage.
[0687] 55. The dsRNA agent of embodiment 54, wherein the strand is the antisense strand.
[0688] 56. The dsRNA agent of any of the preceding embodiments, wherein the base pair at the 1 position of the 5′-end of the antisense strand of the duplex is an AU base pair.
[0689] 57. The dsRNA agent of embodiment 54, wherein the sense strand has a total of 21 nucleotides and the antisense strand has a total of 23 nucleotides.
[0690] 58. The dsRNA agent of any one of embodiments 23-57, wherein one or more lipophilic moieties are conjugated to one or more internal positions on at least one strand.
[0691] 59. The dsRNA agent of embodiment 58, wherein the one or more lipophilic moieties are conjugated to one or more internal positions on at least one strand via a linker or carrier.
[0692] 60. The dsRNA agent of embodiment 59, wherein the internal positions include all positions except the terminal two positions from each end of the at least one strand.
[0693] 61. The dsRNA agent of embodiment 59, wherein the internal positions include all positions except the terminal three positions from each end of the at least one strand.
[0694] 62. The dsRNA agent of any one of embodiments 59-61, wherein the internal positions exclude a cleavage site region of the sense strand.
[0695] 63. The dsRNA agent of embodiment 62, wherein the internal positions include all positions except positions 9-12, counting from the 5′-end of the sense strand.
[0696] 64. The dsRNA agent of embodiment 62, wherein the internal positions include all positions except positions 11-13, counting from the 3′-end of the sense strand.
[0697] 65. The dsRNA agent of any one of embodiments 59-61, wherein the internal positions exclude a cleavage site region of the antisense strand.
[0698] 66. The dsRNA agent of embodiment 65, wherein the internal positions include all positions except positions 12-14, counting from the 5′-end of the antisense strand.
[0699] 67. The dsRNA agent of any one of embodiments 59-61, wherein the internal positions include all positions except positions 11-13 on the sense strand, counting from the 3′-end, and positions 12-14 on the antisense strand, counting from the 5′-end.
[0700] 68. The dsRNA agent of any one of embodiments 23-67, wherein the one or more lipophilic moieties are conjugated to one or more of the internal positions selected from the group consisting of positions 4-8 and 13-18 on the sense strand, and positions 6-10 and 15-18 on the antisense strand, counting from the 5′end of each strand.
[0701] 69. The dsRNA agent of embodiment 68, wherein the one or more lipophilic moieties are conjugated to one or more of the internal positions selected from the group consisting of positions 5, 6, 7, 15, and 17 on the sense strand, and positions 15 and 17 on the antisense strand, counting from the 5′-end of each strand.
[0702] 70. The dsRNA agent of embodiment 24, wherein the positions in the double stranded region exclude a cleavage site region of the sense strand.
[0703] 71. The dsRNA agent of any one of embodiments 23-70, wherein the sense strand is 21 nucleotides in length, the antisense strand is 23 nucleotides in length, and the lipophilic moiety is conjugated to position 21, position 20, position 15, position 1, position 7, position 6, or position 2 of the sense strand or position 16 of the antisense strand.
[0704] 72. The dsRNA agent of embodiment 71, wherein the lipophilic moiety is conjugated to position 21, position 20, position 15, position 1, or position 7 of the sense strand.
[0705] 73. The dsRNA agent of embodiment 71, wherein the lipophilic moiety is conjugated to position 21, position 20, or position 15 of the sense strand.
[0706] 74. The dsRNA agent of embodiment 71, wherein the lipophilic moiety is conjugated to position 20 or position 15 of the sense strand.
[0707] 75. The dsRNA agent of embodiment 71, wherein the lipophilic moiety is conjugated to position 16 of the antisense strand.
[0708] 76. The dsRNA agent of embodiment 71, wherein the lipophilic moiety is conjugated to position 6, counting from the 5′-end of the sense strand.
[0709] 77. The dsRNA agent of any one of embodiments 23-76, wherein the lipophilic moiety is an aliphatic, alicyclic, or polyalicyclic compound.
[0710] 78. The dsRNA agent of embodiment 77, wherein the lipophilic moiety is selected from the group consisting of lipid, cholesterol, retinoic acid, cholic acid, adamantane acetic acid, 1-pyrene butyric acid, dihydrotestosterone, 1,3-bis-O(hexadecyl)glycerol, geranyloxyhexyanol, hexadecylglycerol, borneol, menthol, 1,3-propanediol, heptadecyl group, palmitic acid, myristic acid, O3-(oleoyl)lithocholic acid, O3-(oleoyl)cholenic acid, dimethoxytrityl, or phenoxazine.
[0711] 79. The dsRNA agent of embodiment 78, wherein the lipophilic moiety contains a saturated or unsaturated C4-C30 hydrocarbon chain, and an optional functional group selected from the group consisting of hydroxyl, amine, carboxylic acid, sulfonate, phosphate, thiol, azide, and alkyne.
[0712] 80. The dsRNA agent of embodiment 79, wherein the lipophilic moiety contains a saturated or unsaturated C6-C18 hydrocarbon chain.
[0713] 81. The dsRNA agent of embodiment 79, wherein the lipophilic moiety contains a saturated or unsaturated C16 hydrocarbon chain.
[0714] 82. The dsRNA agent of any one of embodiments 23-81, wherein the lipophilic moiety is conjugated via a carrier that replaces one or more nucleotide(s) in the internal position(s) or the double stranded region.
[0715] 83. The dsRNA agent of embodiment 82, wherein the carrier is a cyclic group selected from the group consisting of pyrrolidinyl, pyrazolinyl, pyrazolidinyl, imidazolinyl, imidazolidinyl, piperidinyl, piperazinyl, [1,3]dioxolanyl, oxazolidinyl, isoxazolidinyl, morpholinyl, thiazolidinyl, isothiazolidinyl, quinoxalinyl, pyridazinonyl, tetrahydrofuranyl, and decalinyl; or is an acyclic moiety based on a serinol backbone or a diethanolamine backbone.
[0716] 84. The dsRNA agent of any one of embodiments 23-81, wherein the lipophilic moiety is conjugated to the double-stranded iRNA agent via a linker containing an ether, thioether, urea, carbonate, amine, amide, maleimide-thioether, disulfide, phosphodiester, sulfonamide linkage, a product of a click reaction, or carbamate.
[0717] 85. The double-stranded iRNA agent of any one of embodiments 23-84, wherein the lipophilic moiety is conjugated to a nucleobase, sugar moiety, or internucleosidic linkage.
[0718] 86. The dsRNA agent of any one of embodiments 23-85, wherein the lipophilic moiety is conjugated via a bio-cleavable linker selected from the group consisting of DNA, RNA, disulfide, amide, functionalized monosaccharides or oligosaccharides of galactosamine, glucosamine, glucose, galactose, mannose, and combinations thereof.
[0719] 87. The dsRNA agent of any one of embodiments 23-86, wherein the 3′ end of the sense strand is protected via an end cap which is a cyclic group having an amine, said cyclic group being selected from the group consisting of pyrrolidinyl, pyrazolinyl, pyrazolidinyl, imidazolinyl, imidazolidinyl, piperidinyl, piperazinyl, [1,3]dioxolanyl, oxazolidinyl, isoxazolidinyl, morpholinyl, thiazolidinyl, isothiazolidinyl, quinoxalinyl, pyridazinonyl, tetrahydrofuranyl, and decalinyl.
[0720] 88. The dsRNA agent of any one of embodiments 23-87, further comprising a targeting ligand, e.g., a ligand that targets an ocular tissue or a liver tissue.
[0721] 89. The dsRNA agent of embodiment 88, wherein the ligand is conjugated to the sense strand.
[0722] 90. The dsRNA agent of embodiment 88 or 89, wherein the ligand is conjugated to the 3′ end or the 5′ end of the sense strand.
[0723] 91. The dsRNA agent of embodiment 88 or 89, wherein the ligand is conjugated to the 3′ end of the sense strand.
[0724] 92. The dsRNA agent of any one of embodiments 88-91, wherein the ocular tissue is a trabecular meshwork tissue, a ciliary body, a retinal tissue, a retinal pigment epithelium (RPE) or choroid tissue, e.g., a choroid vessel.
[0725] 93. The dsRNA agent of any one of embodiments 88-91, wherein the targeting ligand comprises N-acetylgalactosamine (GalNAc).
[0726] 94. The dsRNA agent of any one of embodiments 88-91, wherein the targeting ligand is one or more GalNAc conjugates or one or more or GalNAc derivatives.
[0727] 95. The dsRNA agent of embodiment 94, wherein the one or more GalNAc conjugates or one or more GalNAc derivatives are attached through a monovalent linker, or a bivalent, trivalent, or tetravalent branched linker.
[0728] 96. The dsRNA agent of embodiment 94, wherein the ligand is

[chemical structure]

[0729] 97. The dsRNA agent of embodiment 96, wherein the dsRNA agent is conjugated to the ligand as shown in the following schematic

[chemical structure]

wherein X is O or S.
[0730] 98. The dsRNA agent of embodiment 97, wherein the X is O.
[0731] 99. The dsRNA agent of any one of embodiments 1-98, further comprising a terminal, chiral modification occurring at the first internucleotide linkage at the 3′ end of the antisense strand, having the linkage phosphorus atom in Sp configuration,
[0732] a terminal, chiral modification occurring at the first internucleotide linkage at the 5′ end of the antisense strand, having the linkage phosphorus atom in Rp configuration, and
[0733] a terminal, chiral modification occurring at the first internucleotide linkage at the 5′ end of the sense strand, having the linkage phosphorus atom in either Rp configuration or Sp configuration.
[0734] 100. The dsRNA agent of any one of embodiments 1-98, further comprising
[0735] a terminal, chiral modification occurring at the first and second internucleotide linkages at the 3′ end of the antisense strand, having the linkage phosphorus atom in Sp configuration,
[0736] a terminal, chiral modification occurring at the first internucleotide linkage at the 5′ end of the antisense strand, having the linkage phosphorus atom in Rp configuration, and
[0737] a terminal, chiral modification occurring at the first internucleotide linkage at the 5′ end of the sense strand, having the linkage phosphorus atom in either Rp or Sp configuration.
[0738] 101. The dsRNA agent of any one of embodiments 1-98, further comprising
[0739] a terminal, chiral modification occurring at the first, second and third internucleotide linkages at the 3′ end of the antisense strand, having the linkage phosphorus atom in Sp configuration,
[0740] a terminal, chiral modification occurring at the first internucleotide linkage at the 5′ end of the antisense strand, having the linkage phosphorus atom in Rp configuration, and
[0741] a terminal, chiral modification occurring at the first internucleotide linkage at the 5′ end of the sense strand, having the linkage phosphorus atom in either Rp or Sp configuration.
[0742] 102. The dsRNA agent of any one of embodiments 1-98, further comprising
[0743] a terminal, chiral modification occurring at the first, and second internucleotide linkages at the 3′ end of the antisense strand, having the linkage phosphorus atom in Sp configuration,
[0744] a terminal, chiral modification occurring at the third internucleotide linkages at the 3′ end of the antisense strand, having the linkage phosphorus atom in Rp configuration,
[0745] a terminal, chiral modification occurring at the first internucleotide linkage at the 5′ end of the antisense strand, having the linkage phosphorus atom in Rp configuration, and
[0746] a terminal, chiral modification occurring at the first internucleotide linkage at the 5′ end of the sense strand, having the linkage phosphorus atom in either Rp or Sp configuration.
[0747] 103. The dsRNA agent of any one of embodiments 1-98, further comprising
[0748] a terminal, chiral modification occurring at the first, and second internucleotide linkages at the 3′ end of the antisense strand, having the linkage phosphorus atom in Sp configuration,
[0749] a terminal, chiral modification occurring at the first, and second internucleotide linkages at the 5′ end of the antisense strand, having the linkage phosphorus atom in Rp configuration, and
[0750] a terminal, chiral modification occurring at the first internucleotide linkage at the 5′ end of the sense strand, having the linkage phosphorus atom in either Rp or Sp configuration.
[0751] 104. The dsRNA agent of any one of embodiments 1-103, further comprising a phosphate or phosphate mimic at the 5′-end of the antisense strand.
[0752] 105. The dsRNA agent of embodiment 104, wherein the phosphate mimic is a 5′-vinyl phosphonate (VP).
[0753] 106. A cell containing the dsRNA agent of any one of embodiments 1-105.
[0754] 107. A human ocular cell, e.g., (a cell of the trabecular meshwork, a cell of the ciliary body, an RPE cell, an astrocyte, a pericyte, a Müller cell, a ganglion cell, an endothelial cell, or a photoreceptor cell) comprising a reduced level of MYOC mRNA or a level of MYOC protein as compared to an otherwise similar untreated cell, wherein optionally the level is reduced by at least 10%, 15%, 20%, 25%, 30%, 35%, 40%, 45%, 50%, 55%, 60%, 65%, 70%, 75%, 80%, 85%, 90%, or 95%.
[0755] 108. The human cell of embodiment 107, which was produced by a process comprising contacting a human cell with the dsRNA agent of any one of embodiments 1-94.
[0756] 109. A pharmaceutical composition for inhibiting expression of MYOC, comprising the dsRNA agent of any one of embodiments 1-105.
[0757] 110. A pharmaceutical composition comprising the dsRNA agent of any one of embodiments 1-105 and a lipid formulation.
[0758] 111. A method of inhibiting expression of MYOC in a cell, the method comprising:
   [0759] (a) contacting the cell with the dsRNA agent of any one of embodiments 1-105, or a pharmaceutical composition of embodiment 109 or 110; and
   [0760] (b) maintaining the cell produced in step (a) for a time sufficient to obtain degradation of the mRNA transcript of MYOC, thereby inhibiting expression of MYOC in the cell.
[0761] 112. A method of inhibiting expression of MYOC in a cell, the method comprising:
   [0762] (a) contacting the cell with the dsRNA agent of any one of embodiments 1-105, or a pharmaceutical composition of embodiment 109 or 110. and
   [0763] (b) maintaining the cell produced in step (a) for a time sufficient to reduce levels of MYOC mRNA, MYOC protein, or both of MYOC mRNA and protein, thereby inhibiting expression of MYOC in the cell.
[0764] 113. The method of embodiment 111 or 112, wherein the cell is within a subject.
[0765] 114. The method of embodiment 113, wherein the subject is a human.
[0766] 115. The method of any one of embodiments 111-114, wherein the level of MYOC mRNA is inhibited by at least 50%.
[0767] 116. The method of any one of embodiments 111-114, wherein the level of MYOC protein is inhibited by at least 50%.
[0768] 117. The method of embodiment 114-116, wherein inhibiting expression of MYOC decreases a MYOC protein level in a biological sample (e.g., an aqueous ocular fluid sample) from the subject by at least 30%, 40%, 50%, 60%, 70%, 80%, 90%, or 95%.
[0769] 118. The method of any one of embodiments 114-117, wherein the subject has been diagnosed with a MYOC-associated disorder, e.g., glaucoma, e.g., primary open angle glaucoma (POAG).
[0770] 119. A method of inhibiting expression of MYOC in an ocular cell or tissue, the method comprising:
[0771] (a) contacting the cell or tissue with a dsRNA agent that binds MYOC; and
[0772] (b) maintaining the cell or tissue produced in step (a) for a time sufficient to reduce levels of MYOC mRNA, MYOC protein, or both of MYOC mRNA and protein, thereby inhibiting expression of MYOC in the cell or tissue.
[0773] 120. The method of embodiment 119, wherein the ocular cell or tissue comprises a trabecular meshwork tissue, a ciliary body, an RPE cell, a retinal tissue, an astrocyte, a pericyte, a Müller cell, a ganglion cell, an endothelial cell, a photoreceptor cell, a retinal blood vessel (e.g., including endothelial cells and vascular smooth muscle cells), or choroid tissue, e.g., a choroid vessel.
[0774] 120a. A method of reducing intraocular pressure in a subject, comprising administering to the subject a therapeutically effective amount of the dsRNA agent of any one of embodiments 1-105 or a pharmaceutical composition of embodiment 109 or 110, thereby reducing intraocular pressure in the subject.
[0775] 120b. A method of limiting an increase in intraocular pressure, or maintaining a constant intraocular pressure, in a subject, comprising administering to the subject a therapeutically effective amount of the dsRNA agent of any one of embodiments 1-105 or a pharmaceutical composition of embodiment 109 or 110, thereby limiting the increase in intraocular pressure, or maintaining a constant intraocular pressure in the subject.
[0776] 121. A method of treating a subject having, or diagnosed with having, a MYOC-associated disorder comprising administering to the subject a therapeutically effective amount of the dsRNA agent of any one of embodiments 1-105 or a pharmaceutical composition of embodiment 109 or 110, thereby treating the disorder.
[0777] 122. The method of embodiment 118 or 121, wherein the MYOC-associated disorder is glaucoma.
[0778] 122a. A method of treating a subject having glaucoma, comprising administering to the subject a therapeutically effective amount of the dsRNA agent of any one of embodiments 1-105 or a pharmaceutical composition of embodiment 109 or 110, thereby treating the glaucoma.
[0779] 123. The method of embodiment 122 or 122a, wherein glaucoma is selected from the group consisting of primary open angle glaucoma (POAG).
[0780] 124. The method of any one of embodiments 121-123, wherein treating comprises amelioration of at least one sign or symptom of the disorder.
[0781] 125. The method of embodiment 124, wherein at least one sign or symptom of glaucoma comprises a measure of one or more of optic nerve damage, vision loss, tunnel vision, blurred vision, eye pain or presence, level, or activity of MYOC (e.g., MYOC gene, MYOC mRNA, or MYOC protein).
[0782] 126. The method of any one of embodiments 121-123, where treating comprises prevention of progression of the disorder.
[0783] 127. The method of any one of embodiments 124-126, wherein the treating comprises one or more of (a) inhibiting or reducing the expression or activity of MYOC; (b) reducing the level of misfolded MYOC protein; (c) reducing trabecular meshwork cell death; (d) decreasing intraocular pressure; or (e) increasing visual acuity.
[0784] 128. The method of embodiment 127, wherein the treating results in at least a 30% mean reduction from baseline of MYOC mRNA in the trabecular meshwork tissue, ciliary body, retina, RPE, a retinal blood vessel (e.g., including endothelial cells and vascular smooth muscle cells), or choroid tissue, e.g., a choroid vessel.
[0785] 129. The method of embodiment 128 wherein the treating results in at least a 60% mean reduction from baseline of MYOC mRNA in the trabecular meshwork tissue, ciliary body, retina, RPE, a retinal blood vessel (e.g., including endothelial cells and vascular smooth muscle cells), or choroid tissue, e.g., a choroid vessel.
[0786] 130. The method of embodiment 129, wherein the treating results in at least a 90% mean reduction from baseline of MYOC mRNA in the trabecular meshwork tissue, ciliary body, retina, RPE, a retinal blood vessel (e.g., including endothelial cells and vascular smooth muscle cells), or choroid tissue, e.g., a choroid vessel.
[0787] 131. The method of any one of embodiments 124-129, wherein after treatment the subject experiences at least an 8-week duration of knockdown following a single dose of dsRNA as assessed by MYOC protein in the retina.
[0788] 132. The method of embodiment 131, wherein treating results in at least a 12-week duration of knockdown following a single dose of dsRNA as assessed by MYOC protein in the retina.
[0789] 133. The method of embodiment 132, wherein treating results in at least a 16-week duration of knockdown following a single dose of dsRNA as assessed by MYOC protein in the retina.
[0790] 134. The method of any of embodiments 113-133, wherein the subject is human.
[0791] 135. The method of any one of embodiments 114-134, wherein the dsRNA agent is administered at a dose of about 0.01 mg/kg to about 50 mg/kg.
[0792] 136. The method of any one of embodiments 114-135, wherein the dsRNA agent is administered to the subject intraocularly, intravenously, or topically.
[0793] 137. The method of embodiment 136, wherein the intraocular administration comprises intravitreal administration (e.g., intravitreal injection), transscleral administration (e.g., transscleral injection), subconjunctival administration (e.g., subconjunctival injection), retrobulbar administration (e.g., retrobulbar injection), intracameral administration (e.g., intracameral injection), or subretinal administration (e.g., subretinal injection).
[0794] 138. The method of any one of embodiments 114-137, further comprising measuring level of MYOC (e.g., MYOC gene, MYOC mRNA, or MYOC protein) in the subject.
[0795] 139. The method of embodiment 138, where measuring the level of MYOC in the subject comprises measuring the level of MYOC gene, MYOC protein or MYOC mRNA in a biological sample from the subject (e.g., an aqueous ocular fluid sample).
[0796] 140. The method of any one of embodiments 114-139, further comprising performing a blood test, an imaging test, or an aqueous ocular fluid biopsy.
[0797] 141. The method of any one of embodiments 138-140, wherein measuring level of MYOC (e.g., MYOC gene, MYOC mRNA, or MYOC protein) in the subject is performed prior to treatment with the dsRNA agent or the pharmaceutical composition.
[0798] 142. The method of embodiment 141, wherein, upon determination that a subject has a level of MYOC (e.g., MYOC gene, MYOC mRNA, or MYOC protein) that is greater than a reference level, the dsRNA agent or the pharmaceutical composition is administered to the subject.
[0799] 143. The method of any one of embodiments 139-142, wherein measuring level of MYOC (e.g., MYOC gene, MYOC mRNA, or MYOC protein) in the subject is performed after treatment with the dsRNA agent or the pharmaceutical composition.
[0800] 144. The method of any one of embodiments 121-143, further comprising administering to the subject an additional agent and/or therapy suitable for treatment or prevention of an MYOC-associated disorder.
[0801] 145. The method of embodiment 144, wherein the additional agent and/or therapy comprises one or more of a photodynamic therapy, photocoagulation therapy, a steroid, a non-steroidal anti-inflammatory agent, an anti-MYOC agent, and/or a vitrectomy.

### EXAMPLES

### Example 1. MYOC siRNA

[0802] Nucleic acid sequences provided herein are represented using standard nomenclature. See the abbreviations of Table 1.

TABLE 1
Abbreviations of nucleotide monomers used in nucleic acid
sequence representation It will be understood that these monomers,
when present in an oligonucleotide, are mutually
linked by 5′-3′-phosphodiester bonds.

| Abbreviation | Nucleotide(s) |
|---|---|
| A | Adenosine-3′-phosphate |
| Ab | beta-L-adenosine-3′-phosphate |
| Abs | beta-L-adenosine-3′-phosphorothioate |
| Af | 2′-fluoroadenosine-3′-phosphate |
| Afs | 2′-fluoroadenosine-3′-phosphorothioate |
| (Ahd) | 2′-O-hexadecyl-adenosine-3′-phosphate |
| (Ahds) | 2′-O-hexadecyl-adenosine-3′-phosphorothioate |
| As | adenosine-3′-phosphorothioate |
| (A2p) | adenosine 2′-phosphate |
| (A2ps) | adenosine-2′-phosphorothioate |
| C | cytidine-3′-phosphate |
| Cb | beta-L-cytidine-3′-phosphate |
| Cbs | beta-L-cytidine-3′-phosphorothioate |
| Cf | 2′-fluorocytidine-3′-phosphate |
| Cfs | 2′-fluorocytidine-3′-phosphorothioate |
| (Chd) | 2′-O-hexadecyl-cytidine-3′-phosphate |
| (Chds) | 2′-O-hexadecyl-cytidine-3′-phosphorothioate |
| Cs | cytidine-3′-phosphorothioate |
| (C2p) | cytosine 2′-phosphate |
| (C2ps) | cytidine-2′-phosphorothioate |
| G | guanosine-3′-phosphate |
| Gb | beta-L-guanosine-3′-phosphate |
| Gbs | beta-L-guanosine-3′-phosphorothioate |
| Gf | 2′-fluoroguanosine-3′-phosphate |
| Gfs | 2′-fluoroguanosine-3′-phosphorothioate |
| (Ghd) | 2′-O-hexadecyl-guanosine-3′-phosphate |
| (Ghds) | 2′-O-hexadecyl-guanosine-3′-phosphorothioate |
| Gs | guanosine-3′-phosphorothioate |
| (G2p) | guanosine 2′-phosphate |
| (G2ps) | guanosine-2-phosphorothioate |
| T | 5′-methyluridine-3′-phosphate |
| Tb | beta-L-thymidine-3′-phosphate |
| Tbs | beta-L-thymidine-3′-phosphorothioate |
| Tf | 2′-fluoro-5-methyluridine-3′-phosphate |
| Tfs | 2′-fluoro-5-methyluridine-3′-phosphorothioate |
| Tgn | thymidine-glycol nucleic acid (GNA) S-Isomer |
| Agn | adenosine-glycol nucleic acid (GNA) S-Isomer |
| Con | cytidine-glycol nucleic acid (GNA) S-Isomer |
| Ggn | guanosine-glycol nucleic acid (GNA) S-Isomer |
| Ts | 5-methyluridine-3′-phosphorothioate |
| (T2p) | thymidine 2′-phosphate |
| U | Uridine-3′-phosphate |
| Ub | beta-L-uridine-3′-phosphate |
| Ubs | beta-L-uridine-3′-phosphorothioate |
| Uf | 2′-fluorouridine-3′-phosphate |
| Ufs | 2′-fluorouridine-3′-phosphorothioate |
| (Uhd) | 2′-O-hexadecyl-uridine-3′-phosphate |
| (Uhds) | 2′-O-hexadecyl-uridine-3′-phosphorothioate |
| Us | uridine-3′-phosphorothioate |
| (U2p) | uracil 2′-phosphate |
| (U2ps) | uridine-2-phosphorothioate |
| N | any nucleotide (G, A, C, T or U) |
| VP | Vinyl phosphonate |
| a | 2′-O-methyladenosine-3′-phosphate |
| as | 2′-O-methyladenosine-3′-phosphorothioate |
| C | 2′-O-methylcytidine-3′-phosphate |
| CS | 2′-O-methylcytidine-3′-phosphorothioate |
| g | 2′-O-methylguanosine-3′-phosphate |
| gs | 2′-O-methylguanosine-3′-phosphorothioate |
| t | 2′-O-methyl-5-methyluridine-3′-phosphate |
| ts | 2′-O-methyl-5-methyluridine-3′-phosphorothioate |
| u | 2′-O-methyluridine-3′-phosphate |
| us | 2′-O-methyluridine-3′-phosphorothioate |
| dA | 2′-deoxyadenosine-3′-phosphate |
| dAs | 2′-deoxyadenosine-3′-phosphorothioate |
| dC | 2′-deoxycytidine-3′-phosphate |
| dCs | 2′-deoxycytidine-3′-phosphorothioate |
| dG | 2′-deoxyguanosine-3′-phosphate |
| dGs | 2′-deoxyguanosine-3′-phosphorothioate |
| dT | 2′-deoxythymidine |
| dTs | 2′-deoxythymidine-3′-phosphorothioate |
| dU | 2′-deoxyuridine |
| s | phosphorothioate linkage |
| L96¹ | N-[tris(GalNAc-alkyl)-amidodecanoyl)]-4-hydroxyprolinol Hyp-(GalNAc-alkyl)3 |
| (Aeo) | 2′-O-methoxyethyladenosine-3′-phosphate |
| (Aeos) | 2′-O-methoxyethyladenosine-3′-phosphorothioate |
| (Geo) | 2′-O-methoxyethylguanosine-3′-phosphate |
| (Geos) | 2′-O-methoxyethylguanosine-3′-phosphorothioate |
| (Teo) | 2′-O-methoxyethyl-5-methyluridine-3′-phosphate |
| (Teos) | 2′-O-methoxyethyl-5-methyluridine-3′-phosphorothioate |
| (m5Ceo) | 2′-O-methoxyethyl-5-methylcytidine-3′-phosphate |
| (m5Ceos) | 2′-O-methoxyethyl-5-methylcytidine-3′-phosphorothioate |

¹The chemical structure of L96 is as follows:

[chemical structure]

### Experimental Methods

### Bioinformatics

### Transcripts

[0803] Four sets of siRNAs targeting the human MYOC, “myocilin” (human: NCBI refseqID NM_000261.2; NCBI GeneID: 4653) were generated. The human NM_000261.2 REFSEQ mRNA has a length of 2100 bases. Pairs of oligos were generated using bioinformatic methods and ranked, and exemplary pairs of oligos are shown in Table 2A and Table 2B. Modified sequences are presented in Table 2A. Unmodified sequences are presented in Table 2B.

TABLE 2A
Exemplary Human MYOC siRNA Modified Single Strands and Duplex Sequences
Column 1 indicates duplex name and the number following the decimal point in a duplex name merely refers to a batch production
number. Column 2 indicates the name of the sense sequence. Column 3 indicates the sequence ID for the sequence of column 4.
Column 4 provides the modified sequence of a sense strand suitable for use in a duplex described herein. Column 5 indicates the
antisense sequence name. Column 6 indicates the sequence ID for the sequence of column 7. Column 7 provides the sequence of a
modified antisense strand suitable for use in a duplex described herein, e.g., a duplex comprising the sense sequence in the same row
of the table. Column 8 indicates the position in the target mRNA (NM_000261.2) that is complementary to the antisense strand of
Column 7. Column 9 indicated the sequence ID for the sequence of column 8.

| | | | | | Seq ID | | | |
|---|---|---|---|---|---|---|---|---|
| | Sense | Seq ID | | Antisense | NO: | | mRNA target | |
| Duplex | sequence | NO: | Sense sequence | sequence | (anti | Antisense sequence | sequence in | SEQ ID NO: |
| Name | name | (sense) | (5′-3′) | name | sense) | (5′-3′) | NM_000261.2 | (mRNA target) |
| AD- | A- | 7 | csuscuc(Ahd)GfcAf | A- | 451 | VPusAfsadGc(Tgn)cug | ACCUCUCAGCACAGC | 895 |
| 1565444.1 | 2893965.1 | | CfAfgcagagcususa | 2893966.1 | | cuguGfcUfgagagsgsu | AGAGCUUU | |
| AD- | A- | 8 | csuscuc(Ahd)GfcAf | A- | 452 | VPusAfsagcdTc(Tgn)gc | ACCUCUCAGCACAGC | 896 |
| 1565445.1 | 2893965.1 | | CfAfgcagagcususa | 2893967.1 | | uguGfcUfgagagsgsu | AGAGCUUU | |
| AD- | A- | 9 | csuscuc(Ahd)GfcAf | A- | 453 | VPusAfsagdCu(C2p)ug | ACCUCUCAGCACAGC | 897 |
| 1565692.1 | 2893965.1 | | CfAfgcagagcususa | 2894431.1 | | cuguGfcUfgagagsgsu | AGAGCUUU | |
| AD- | A- | 10 | uscsucag(Chd)aCfAf | A- | 454 | VPusAfsaadGc(Tgn)cu | CCUCUCAGCACAGCA | 898 |
| 1565446.1 | 2893968.1 | | Gfcagagcuususa | 2893969.1 | | gcugUfgCfugagasgsg | GAGCUUUC | |
| AD- | A- | 11 | csasgcag(Ahd)gCfUf | A- | 455 | VPusUfsccdTc(Tgn)gga | CACAGCAGAGCUUUC | 899 |
| 1565447.1 | 2893970.1 | | Ufuccagaggsasa | 2893971.1 | | aagCfuCfugcugsusg | CAGAGGAA | |
| AD- | A- | 12 | asasug(Ahd)gGfuUf | A- | 456 | VPusGfsudGc(Agn)cag | GCAAUGAGGUUCUUC | 900 |
| 1565448.1 | 2893972.1 | | CfUfucugugcascsa | 2893973.1 | | aagaAfcCfucauusgsc | UGUGCACG | |
| AD- | A- | 13 | asasug(Ahd)gGfuUf | A- | 457 | VPusGfsugdCa(C2p)ag | GCAAUGAGGUUCUUC | 901 |
| 1565693.1 | 2893972.1 | | CfUfucugugcascsa | 2894432.1 | | aagaAfcCfucauusgsc | UGUGCACG | |
| AD- | A- | 14 | asusgagg(Uhd)uCfU | A- | 458 | VPusCfsgudGc(Agn)ca | CAAUGAGGUUCUUCU | 902 |
| 1565449.1 | 2893974.1 | | fUfcugugcacsgsa | 2893975.1 | | gaagAfaCfcucaususg | GUGCACGU | |
| AD- | A- | 15 | usgsagg(Uhd)UfcUf | A- | 459 | VPusAfscgudGc(Agn)c | AAUGAGGUUCUUCU | 903 |
| 1565450.1 | 2893976.1 | | UfCfugugcacgsusa | 2893977.1 | | agaaGfaAfccucasusu | GUGCACGUU | |
| AD- | A- | 16 | usgsagg(Uhd)UfcUf | A- | 460 | VPusAfscgdTg(C2p)ac | AAUGAGGUUCUUCU | 904 |
| 1565694.1 | 2893976.1 | | UfCfugugcacgsusa | 2894433.1 | | agaaGfaAfccucasusu | GUGCACGUU | |
| AD- | A- | 17 | gsasggu(Uhd)CfuUf | A- | 461 | VPusAfsacdGu(G2p)ca | AUGAGGUUCUUCUG | 905 |
| 1565695.1 | 2894434.1 | | CfUfgugcacgususa | 2894435.1 | | cagaAfgAfaccucsasu | UGCACGUUG | |
| AD- | A- | 18 | asgsguu(Chd)UfuCf | A- | 462 | VPusCfsaacGfuGfCfac | UGAGGUUCUUCUGU | 906 |
| 1193175.5 | 2058874.1 | | UfGfugcacguusgsa | 1801665.1 | | agAfaGfaaccuscsa | GCACGUUGC | |
| AD- | A- | 19 | asgsguu(Chd)uuCfU | A- | 463 | VPusdCsaadCgdTgcac | UGAGGUUCUUCUGU | 907 |
| 1565793.1 | 2893978.1 | | fGfugcacguusgsa | 2894582.1 | | dAgAfagaaccuscsg | GCACGUUGC | |
| AD- | A- | 20 | asgsguu(Chd)UfuCf | A- | 464 | VPusCfsaadCg(Tgn)gc | UGAGGUUCUUCUGU | 908 |
| 1565795.1 | 2058874.1 | | UfGfugcacguusgsa | 2894585.1 | | acagAfaGfaaccuscsg | GCACGUUGC | |
| AD- | A- | 21 | asgsguu(Chd)UfuCf | A- | 465 | VPudCsaadCg(Tgn)gca | UGAGGUUCUUCUGU | 909 |
| 1565796.1 | 2058874.1 | | UfGfugcacguusgsa | 2894586.1 | | cdAgAfagaaccuscsg | GCACGUUGC | |
| AD- | A- | 22 | asgsgua(Chd)UfuCf | A- | 466 | VPusCfsaadCg(Tgn)gc | UGAGGUUCUUCUGU | 910 |
| 1565797.1 | 2894587.1 | | UfGfugcacguusgsa | 2894588.1 | | acagAfaGfuaccuscsg | GCACGUUGC | |
| AD- | A- | 23 | asgsgau(Chd)UfuCf | A- | 467 | VPusCfsaadCg(Tgn)gc | UGAGGUUCUUCUGU | 911 |
| 1565798.1 | 2894589.1 | | UfGfugcacguusgsa | 2894590.1 | | acagAfaGfauccuscsg | GCACGUUGC | |
| AD- | A- | 24 | asgscuu(Chd)UfuCf | A- | 468 | VPusCfsaadCg(Tgn)gc | UGAGGUUCUUCUGU | 912 |
| 1565799.1 | 2894591.1 | | UfGfugcacguusgsa | 2894592.1 | | acagAfaGfaagcuscsg | GCACGUUGC | |
| AD- | A- | 25 | asgsguu(Chd)uuCfU | A- | 469 | VPusdCsaadCgdTgcac | UGAGGUUCUUCUGU | 913 |
| 1565451.1 | 2893978.1 | | fGfugcacguusgsa | 2893979.1 | | dAgAfagaaccuscsa | GCACGUUGC | |
| AD- | A- | 26 | gsgsuuc(Uhd)ucUfG | A- | 470 | VPusdGscadAcdGugca | GAGGUUCUUCUGUG | 914 |
| 1565452.1 | 2893980.1 | | fUfgcacguugscsa | 2893981.1 | | dCaGfaagaaccsusc | CACGUUGCU | |
| AD- | A- | 27 | gsgsuuc(Uhd)UfcUf | A- | 471 | VPusGfscadAc(G2p)ug | GAGGUUCUUCUGUG | 915 |
| 1565696.1 | 2894436.1 | | GfUfgcacguugscsa | 2894437.1 | | cacaGfaAfgaaccsusc | CACGUUGCU | |
| AD- | A- | 28 | gsusucu(Uhd)CfUfG | A- | 472 | VPusdCsaadCgdTgcac | AGGUUCUUCUGUGCA | 916 |
| 1565794.1 | 2894583.1 | | fugcacguusgsa | 2894584.1 | | dAgAfagaacscsu | CGUUGC | |
| AD- | A- | 29 | gsusucu(Uhd)cuGfU | A- | 473 | VPusdAsgcdAadCgugc | AGGUUCUUCUGUGCA | 917 |
| 1565453.1 | 2893982.1 | | fGfcacguugcsusa | 2893983.1 | | dAcAfgaagaacscsu | CGUUGCUG | |
| AD- | A- | 30 | ususcuu(Chd)ugUfG | A- | 474 | VPusdCsagdCadAcgug | GGUUCUUCUGUGCAC | 918 |
| 1565454.1 | 2893984.1 | | fCfacguugcusgsa | 2893985.1 | | dCaCfagaagaascsc | GUUGCUGC | |
| AD- | A- | 31 | uscsuuc(Uhd)GfuGf | A- | 475 | VPusGfscadGc(Agn)ac | GUUCUUCUGUGCACG | 919 |
| 1565455.1 | 2893986.1 | | CfAfcguugcugscsa | 2893987.1 | | gugcAfcAfgaagasasc | UUGCUGCA | |
| AD- | A- | 32 | uscsuuc(Uhd)guGfC | A- | 476 | VPusdGscadGcdAacgu | GUUCUUCUGUGCACG | 920 |
| 1565456.1 | 2893988.1 | | fAfcguugcugscsa | 2893989.1 | | dGcAfcagaagasasc | UUGCUGCA | |
| AD- | A- | 33 | csusucug(Uhd)gCfA | A- | 477 | VPusUfsgcadGc(Agn)a | UUCUUCUGUGCACGU | 921 |
| 1565457.1 | 2893990.1 | | fCfguugcugcsasa | 2893991.1 | | cgugCfaCfagaagsasa | UGCUGCAG | |
| AD- | A- | 34 | csusucug(Uhd)gCfA | A- | 478 | VPusUfsgcdAg(C2p)aa | UUCUUCUGUGCACGU | 922 |
| 1565697.1 | 2893990.1 | | fCfguugcugcsasa | 2894438.1 | | cgugCfaCfagaagsasa | UGCUGCAG | |
| AD- | A- | 35 | ususcug(Uhd)GfcAf | A- | 479 | VPusCfsugdCa(G2p)ca | UCUUCUGUGCACGUU | 923 |
| 1565698.1 | 2894439.1 | | CfGfuugcugcasgsa | 2894440.1 | | acguGfcAfcagaasgsa | GCUGCAGC | |
| AD- | A- | 36 | uscsugug(Chd)aCfG | A- | 480 | VPusGfscudGc(Agn)gc | CUUCUGUGCACGUUG | 924 |
| 1565458.1 | 2893992.1 | | fUfugcugcagscsa | 2893993.1 | | aacgUfgCfacagasasg | CUGCAGCU | |
| AD- | A- | 37 | csusgug(Chd)AfcGf | A | 481 | VPusAfsgcudGc(Agn)g | UUCUGUGCACGUUGC | 925 |
| 1565459.1 | 2893994.1 | | UfUfgcugcagcsusa | 2893995.1 | | caacGfuGfcacagsasa | UGCAGCUU | |
| AD- | A- | 38 | csusgug(Chd)AfcGf | A- | 482 | VPusAfsgcdTg(C2p)ag | UUCUGUGCACGUUGC | 926 |
| 1565699.1 | 2893994.1 | | UfUfgcugcagcsusa | 2894441.1 | | caacGfuGfcacagsasa | UGCAGCUU | |
| AD- | A- | 39 | usgsugc(Ahd)CfgUf | A- | 483 | VPusAfsagdCu(G2p)ca | UCUGUGCACGUUGCU | 927 |
| 1565700.1 | 2894442.1 | | UfGfcugcagcususa | 2894443.1 | | gcaaCfgUfgcacasgsa | GCAGCUUU | |
| AD- | A- | 40 | gsusgca(Chd)GfuUf | A- | 484 | VPusAfsaadGc(Tgn)gc | CUGUGCACGUUGCUG | 928 |
| 1565460.1 | 2893996.1 | | GfCfugcagcuususa | 2893997.1 | | agcaAfcGfugcacsasg | CAGCUUUG | |
| AD- | A- | 41 | gscsacg(Uhd)ugCfU | A- | 485 | VPusdCscadAadGcugc | GUGCACGUUGCUGCA | 929 |
| 1565461.1 | 2893998.1 | | fGfcagcuuugsgsa | 2893999.1 | | dAgCfaacgugcsasc | GCUUUGGG | |
| AD- | A- | 42 | csascgu(Uhd)gcUfG | A- | 486 | VPusdCsccdAadAgcug | UGCACGUUGCUGCAG | 930 |
| 1565462.1 | 2894000.1 | | fCfagcuuuggsgsa | 2894001.1 | | dCaGfcaacgugscsa | CUUUGGGC | |
| AD- | A- | 43 | gsasgaug(Chd)cAfG | A- | 487 | VPusAfsgcdTg(G2p)ac | CUGAGAUGCCAGCUG | 931 |
| 1565701.1 | 2894444.1 | | fCfuguccagcsusa | 2894445.1 | | agcuGfgCfaucucsasg | UCCAGCUG | |
| AD- | A- | 44 | gsasugc(Chd)AfgCf | A- | 488 | VPusGfscadGc(Tgn)gg | GAGAUGCCAGCUGUC | 932 |
| 1565463.1 | 2894002.1 | | UfGfuccagcugscsa | 2894003.1 | | acagCfuGfgcaucsusc | CAGCUGCU | |
| AD- | A- | 45 | csusguc(Chd)agCfUf | A- | 489 | VPusdCsagdAadGcagc | AGCUGUCCAGCUGCU | 933 |
| 1565464.1 | 2894004.1 | | Gfcugcuucusgsa | 2894005.1 | | dAgCfuggacagscsu | GCUUCUGG | |
| AD- | A- | 46 | cscsagc(Uhd)GfcUf | A- | 490 | VPusAfsggdCc(Agn)ga | GUCCAGCUGCUGCUU | 934 |
| 1565465.1 | 2894006.1 | | GfCfuucuggccsusa | 2894007.1 | | agcaGfcAfgcuggsasc | CUGGCCUG | |
| AD- | A- | 47 | csusggc(Chd)UfgCfC | A- | 491 | VPusUfscdCc(Agn)cac | UUCUGGCCUGCCUGG | 935 |
| 1565466.1 | 2894008.1 | | fUfggugugggsasa | 2894009.1 | | caggCfaGfgccagsasa | UGUGGGAU | |
| AD- | A- | 48 | csusggc(Chd)UfgCfC | A- | 492 | VPusUfscccdAc(Agn)cc | UUCUGGCCUGCCUGG | 936 |
| 1565467.1 | 2894008.1 | | fUfggugugggsasa | 2894010.1 | | aggCfaGfgccagsasa | UGUGGGAU | |
| AD- | A- | 49 | csusggc(Chd)UfgCfC | A- | 493 | VPusUfsccdCa(C2p)ac | UUCUGGCCUGCCUGG | 937 |
| 1565702.1 | 2894008.1 | | fUfggugugggsasa | 2894446.1 | | caggCfaGfgccagsasa | UGUGGGAU | |
| AD- | A- | 50 | usgsgcc(Uhd)GfcCf | A- | 494 | VPusAfsucdCc(Agn)ca | UCUGGCCUGCCUGGU | 938 |
| 1565468.1 | 2894011.1 | | UfGfgugugggasusa | 2894012.1 | | ccagGfcAfggccasgsa | GUGGGAUG | |
| AD- | A- | 51 | gscscug(Chd)CfuGf | A- | 495 | VPusAfscadTcdAcacac | UGGCCUGCCUGGUGU | 939 |
| 1565469.1 | 2894013.1 | | GfUfgugugaugsusa | 2894014.1 | | cAfgGfcaggcscsa | GGGAUGUG | |
| AD- | A- | 52 | gscscug(Chd)CfuGf | A- | 496 | VPusAfscadTc(C2p)cac | UGGCCUGCCUGGUGU | 940 |
| 1565703.1 | 2894447.1 | | GfUfgugggaugsusa | 2894448.1 | | accAfgGfcaggcscsa | GGGAUGUG | |
| AD- | A- | 53 | asgsag(Uhd)gGfcCf | A- | 497 | VPusAfsuadCu(G2p)gc | CCAGAGUGGCCGAUG | 941 |
| 1565704.1 | 2894449.1 | | GfAfugccaguasusa | 2894450.1 | | aucgGfcCfacucusgsg | CCAGUAUA | |
| AD- | A- | 54 | asgsug(Uhd)gGfcCf | A- | 498 | VPusUfscadTu(G2p)gg | UCAGUGUGGCCAGUC | 942 |
| 1565705.1 | 2894451.1 | | AfGfucccaaugsasa | 2894452.1 | | acugGfcCfacacusgsa | CCAAUGAA | |
| AD- | A- | 55 | gsusgugg(Chd)cAfG | A- | 499 | VPusUfsucdAu(Tgn)gg | CAGUGUGGCCAGUCC | 943 |
| 1565470.1 | 2894015.1 | | fUfcccaaugasasa | 2894016.1 | | gacuGfgCfcacacsusg | CAAUGAAU | |
| AD- | A- | 56 | gsusgugg(Chd)cAfG | A- | 500 | VPusdTsucdAudTggga | CAGUGUGGCCAGUCC | 944 |
| 1565471.1 | 2894015.1 | | fUfcccaaugasasa | 2894017.1 | | dCuGfgccacacsusg | CAAUGAAU | |
| AD- | A- | 57 | gscscagg(Chd)cAfUf | A- | 501 | VPusGfsadTg(Agn)cug | GAGCCAGGCCAUGUC | 945 |
| 1565472.1 | 2894018.1 | | Gfucagucauscsa | 2894019.1 | | acauGfgCfcuggcsusc | AGUCAUCC | |
| AD- | A- | 58 | gscscagg(Chd)cAfUf | A- | 502 | VPusGfsaugdAc(Tgn)g | GAGCCAGGCCAUGUC | 946 |
| 1565473.1 | 2894018.1 | | Gfucagucauscsa | 2894020.1 | | acauGfgCfcuggcsusc | AGUCAUCC | |
| AD- | A- | 59 | gscscagg(Chd)cAfUf | A- | 503 | VPusGfsaudGa(C2p)ug | GAGCCAGGCCAUGUC | 947 |
| 1565706.1 | 2894018.1 | | Gfucagucauscsa | 2894453.1 | | acauGfgCfcuggcsusc | AGUCAUCC | |
| AD- | A- | 60 | gsgscca(Uhd)GfuCf | A- | 504 | VPusUfsaudGg(Agn)ug | CAGGCCAUGUCAGUC | 948 |
| 1565474.1 | 2894021.1 | | AfGfucauccausasa | 2894022.1 | | acugAfcAfuggccsusg | AUCCAUAA | |
| AD- | A- | 61 | gsascc(Uhd)gGfaGf | A- | 505 | VPusGfscudTu(G2p)gu | UAGACCUGGAGGCCA | 949 |
| 1565707.1 | 2894454.1 | | GfCfcaccaaagscsa | 2894455.1 | | ggccUfcCfaggucsusa | CCAAAGCU | |
| AD- | A- | 62 | csusgg(Ahd)gGfcCf | A- | 506 | VPusCfsgadGc(Tgn)uu | ACCUGGAGGCCACCA | 950 |
| 1565475.1 | 2894023.1 | | AfCfcaaagcucsgsa | 2894024.1 | | ggugGfcCfuccagsgsu | AAGCUCGA | |
| AD- | A- | 63 | gsasaac(Chd)CfaAf | A- | 507 | VPusAfsacdTc(Tgn)cug | UGGAAACCCAAACCA | 951 |
| 1565476.1 | 2894025.1 | | AfCfcagagagususa | 2894026.1 | | guuUfgGfguuucscsa | GAGAGUUG | |
| AD- | A- | 64 | csasgca(Ahd)CfcUfC | A- | 508 | VPusUfsgdTc(Tgn)cgg | UACAGCAACCUCCUCC | 952 |
| 1565477.1 | 2894027.1 | | fCfuccgagacsasa | 2894028.1 | | aggaGfgUfugcugsusa | GAGACAA | |
| AD- | A- | 65 | csasgca(Ahd)CfcUfC | A- | 509 | VPusUfsgudCu(C2p)gg | UACAGCAACCUCCUCC | 953 |
| 1565708.1 | 2894027.1 | | fCfuccgagacsasa | 2894456.1 | | aggaGfgUfugcugsusa | GAGACAA | |
| AD- | A- | 66 | gscsaac(Chd)UfcCf | A- | 510 | VPusCfsudTg(Tgn)cuc | CAGCAACCUCCUCCGA | 954 |
| 1565478.1 | 2894029.1 | | UfCfcgagacaasgsa | 2894030.1 | | ggagGfaGfguugcsusg | GACAAGU | |
| AD- | A- | 67 | gscsaac(Chd)UfcCf | A- | 511 | VPusCfsuugdTc(Tgn)c | CAGCAACCUCCUCCGA | 955 |
| 1565479.1 | 2894029.1 | | UfCfcgagacaasgsa | 2894031.1 | | ggagGfaGfguugcsusg | GACAAGU | |
| AD- | A- | 68 | gscsaac(Chd)UfcCf | A- | 512 | VPusCfsuudGu(C2p)uc | CAGCAACCUCCUCCGA | 956 |
| 1565709.1 | 2894029.1 | | UfCfcgagacaasgsa | 2894457.1 | | ggagGfaGfguugcsusg | GACAAGU | |
| AD- | A- | 69 | asgsaca(Ahd)guCfAf | A- | 513 | VPusdCscudCcdAgaac | CGAGACAAGUCAGUU | 957 |
| 1565480.1 | 2894032.1 | | Gfuucuggagsgsa | 2894033.1 | | dTgAfcuugucuscsg | CUGGAGGA | |
| AD- | A- | 70 | csasagu(Chd)AfgUf | A- | 514 | VPusCfsuudCc(Tgn)cc | GACAAGUCAGUUCUG | 958 |
| 1565481.1 | 2894034.1 | | UfCfuggaggaasgsa | 2894035.1 | | agaaCfuGfacuugsusc | GAGGAAGA | |
| AD- | A- | 71 | gsuscag(Uhd)UfcUf | A- | 515 | VPusUfscudCu(Tgn)cc | AAGUCAGUUCUGGAG | 959 |
| 1565482.1 | 2894036.1 | | GfGfaggaagagsasa | 2894037.1 | | uccaGfaAfcugacsusu | GAAGAGAA | |
| AD- | A- | 72 | asgsaau(Chd)ugGfC | A- | 516 | VPusdCsaadCcdTccug | UGAGAAUCUGGCCAG | 960 |
| 1565483.1 | 2894038.1 | | fCfaggagguusgsa | 2894039.1 | | dGcCfagauucuscsa | GAGGUUGG | |
| AD- | A- | 73 | usgsgcc(Ahd)GfgAf | A- | 517 | VPusGfscdTu(Tgn)cca | UCUGGCCAGGAGGUU | 961 |
| 1565484.1 | 2894040.1 | | GfGfuuggaaagscsa | 2894041.1 | | accuCfcUfggccasgsa | GGAAAGCA | |
| AD- | A- | 74 | usgsgcc(Ahd)GfgAf | A- | 518 | VPusGfscudTu(C2p)ca | UCUGGCCAGGAGGUU | 962 |
| 1565710.1 | 2894040.1 | | GfGfuuggaaagscsa | 2894458.1 | | accuCfcUfggccasgsa | GGAAAGCA | |
| AD- | A- | 75 | csasgcc(Ahd)GfgAf | A- | 519 | VPusGfsccdTu(G2p)cu | AGCAGCCAGGAGGUA | 963 |
| 1565711.1 | 2894459.1 | | GfGfuagcaaggscsa | 2894460.1 | | accuCfcUfggcugscsu | GCAAGGCU | |
| AD- | A- | 76 | usgscca(Chd)CfaGf | A- | 520 | VPusUfsucdTc(Tgn)gg | UGUGCCACCAGGCUC | 964 |
| 1565485.1 | 2894042.1 | | GfCfuccagagasasa | 2894043.1 | | agccUfgGfuggcascsa | CAGAGAAG | |
| AD- | A- | 77 | asasuu(Uhd)gGfaCf | A- | 521 | VPusAfsaggdCc(Agn)a | GGAAUUUGGACACUU | 965 |
| 1565486.1 | 2894044.1 | | AfCfuuuggccususa | 2894045.1 | | agugUfcCfaaauuscsc | UGGCCUUC | |
| AD- | A- | 78 | asasuu(Uhd)gGfaCf | A- | 522 | VPusAfsagdGc(C2p)aa | GGAAUUUGGACACUU | 966 |
| 1565712.1 | 2894044.1 | | AfCfuuuggccususa | 2894461.1 | | agugUfcCfaaauuscsc | UGGCCUUC | |
| AD- | A- | 79 | ascsacu(Uhd)UfgGf | A- | 523 | VPusUfsucdCu(G2p)ga | GGACACUUUGGCCUU | 967 |
| 1565713.1 | 2894462.1 | | CfCfuuccaggasasa | 2894463.1 | | aggcCfaAfaguguscsc | CCAGGAAC | |
| AD- | A- | 80 | csusuugg(Chd)cUfU | A- | 524 | VPusdCsagdTudCcugg | CACUUUGGCCUUCCA | 968 |
| 1565487.1 | 2894046.1 | | fCfcaggaacusgsa | 2894047.1 | | dAaGfgccaaagsusg | GGAACUGA | |
| AD- | A- | 81 | asgsgaa(Chd)UfgAf | A- | 525 | VPusUfsagdCu(C2p)gg | CCAGGAACUGAAGUC | 969 |
| 1565714.1 | 2894048.1 | | AfGfuccgagcusasa | 2894464.1 | | acuuCfaGfuuccusgsg | CGAGCUAA | |
| AD- | A- | 82 | asgsgaa(Chd)UfgAf | A- | 526 | VPusUfsadGc(Tgn)cgg | CCAGGAACUGAAGUC | 970 |
| 1565488.1 | 2894048.1 | | AfGfuccgagcusasa | 2894049.1 | | acuuCfaGfuuccusgsg | CGAGCUAA | |
| AD- | A- | 83 | gsasagu(Chd)CfgAf | A- | 527 | VPusCfsuudCa(G2p)uu | CUGAAGUCCGAGCUA | 971 |
| 1565715.1 | 2894465.1 | | GfCfuaacugaasgsa | 2894466.1 | | agcuCfgGfacuucsasg | ACUGAAGU | |
| AD- | A- | 84 | gscsuaa(Chd)UfgAf | A- | 528 | VPusAfsagdCa(G2p)ga | GAGCUAACUGAAGUU | 972 |
| 1565716.1 | 2894467.1 | | AfGfuuccugcususa | 2894468.1 | | acuuCfaGfuuagcsusc | CCUGCUUC | |
| AD- | A- | 85 | csusaac(Uhd)GfaAf | A- | 529 | VPusGfsaadGc(Agn)gg | AGCUAACUGAAGUUC | 973 |
| 1565489.1 | 2894050.1 | | GfUfuccugcuuscsa | 2894051.1 | | aacuUfcAfguuagscsu | CUGCUUCC | |
| AD- | A- | 86 | gsasagu(Uhd)CfcUf | A- | 530 | VPusAfsuudCg(G2p)ga | CUGAAGUUCCUGCUU | 974 |
| 1565717.1 | 2894469.1 | | GfCfuucccgaasusa | 2894470.1 | | agcaGfgAfacuucsasg | CCCGAAUU | |
| AD- | A- | 87 | gsasgaa(Chd)UfaGf | A- | 531 | VPusUfsccdTa(C2p)cc | UGGAGAACUAGUUU | 975 |
| 1565718.1 | 2894052.1 | | UfUfuggguaggsasa | 2894471.1 | | aaacUfaGfuucucscsa | GGGUAGGAG | |
| AD- | A- | 88 | gsasgaa(Chd)UfaGf | A- | 532 | VPusUfscdCu(Agn)ccc | UGGAGAACUAGUUU | 976 |
| 1565490.1 | 2894052.1 | | UfUfuggguaggsasa | 2894053.1 | | aaacUfaGfuucucscsa | GGGUAGGAG | |
| AD- | A- | 89 | ascsuag(Uhd)UfuGf | A- | 533 | VPusGfscudCu(C2p)cu | GAACUAGUUUGGGU | 977 |
| 1565719.1 | 2894054.1 | | GfGfuaggagagscsa | 2894472.1 | | acccAfaAfcuagususc | AGGAGAGCC | |
| AD- | A- | 90 | ascsuag(Uhd)UfuGf | A- | 534 | VPusGfscdTc(Tgn)cuac | GAACUAGUUUGGGU | 978 |
| 1565491.1 | 2894054.1 | | GfGfuaggagagscsa | 2894055.1 | | ccAfaAfcuagususc | AGGAGAGC | |
| AD- | A- | 91 | gsgsgu(Ahd)gGfaGf | A- | 535 | VPusCfsgudGa(G2p)ag | UUGGGUAGGAGAGCC | 979 |
| 1565720.1 | 2894473.1 | | AfGfccucucacsgsa | 2894474.1 | | gcucUfcCfuacccsasa | UCUCACGC | |
| AD- | A- | 92 | gsusagg(Ahd)GfaGf | A- | 536 | VPusAfsgcdGu(G2p)ag | GGGUAGGAGAGCCUC | 980 |
| 1565721.1 | 2894475.1 | | CfCfucucacgcsusa | 2894476.1 | | aggcUfcUfccuacscsc | UCACGCUG | |
| AD- | A- | 93 | gsusagg(Ahd)gaGfC | A- | 537 | VPusdAsgcdGudGagag | GGGUAGGAGAGCCUC | 981 |
| 1565492.1 | 2894056.1 | | fCfucucacgcsusa | 2894057.1 | | dGcUfcuccuacscsc | UCACGCUG | |
| AD- | A- | 94 | usasggag(Ahd)gCfCf | A- | 538 | VPusdCsagdCgdTgaga | GGUAGGAGAGCCUCU | 982 |
| 1565493.1 | 2894058.1 | | Ufcucacgcusgsa | 2894059.1 | | dGgCfucuccuascsc | CACGCUGA | |
| AD- | A- | 95 | asgsgag(Ahd)GfcCf | A- | 539 | VPusUfscadGc(G2p)ug | GUAGGAGAGCCUCUC | 983 |
| 1565722.1 | 2894477.1 | | UfCfucacgcugsasa | 2894478.1 | | agagGfcUfcuccusasc | ACGCUGAG | |
| AD- | A- | 96 | gscscuc(Uhd)CfaCf | A- | 540 | VPusCfsugdTu(C2p)uc | GAGCCUCUCACGCUG | 984 |
| 1565723.1 | 2894060.1 | | GfCfugagaacasgsa | 2894479.1 | | agcgUfgAfgaggcsusc | AGAACAGC | |
| AD- | A- | 97 | gscscuc(Uhd)CfaCf | A- | 541 | VPusCfsudGu(Tgn)cuc | GAGCCUCUCACGCUG | 985 |
| 1565494.1 | 2894060.1 | | GfCfugagaacasgsa | 2894061.1 | | agcgUfgAfgaggcsusc | AGAACAGC | |
| AD- | A- | 98 | gscscuc(Uhd)CfaCf | A- | 542 | VPusCfsugudTc(Tgn)c | GAGCCUCUCACGCUG | 986 |
| 1565495.1 | 2894060.1 | | GfCfugagaacasgsa | 2894062.1 | | agcgUfgAfgaggcsusc | AGAACAGC | |
| AD- | A- | 99 | csascgc(Uhd)GfaGf | A- | 543 | VPusUfsuudCu(G2p)c | CUCACGCUGAGAACA | 987 |
| 1565724.1 | 2894480.1 | | AfAfcagcagaasasa | 2894481.1 | | uguucUfcAfgcgugsasg | GCAGAAAC | |
| AD- | A- | 100 | ascsgcug(Ahd)gAfAf | A- | 544 | VPusGfsuudTc(Tgn)gc | UCACGCUGAGAACAG | 988 |
| 1565496.1 | 2894063.1 | | Cfagcagaaascsa | 2894064.1 | | uguuCfuCfagcgusgsa | CAGAAACA | |
| AD- | A- | 101 | csgscug(Ahd)GfaAf | A- | 545 | VPusUfsgudTu(C2p)ug | CACGCUGAGAACAGC | 989 |
| 1565725.1 | 2894065.1 | | CfAfgcagaaacsasa | 2894482.1 | | cuguUfcUfcagcgsusg | AGAAACAA | |
| AD- | A- | 102 | csgscug(Ahd)GfaAf | A- | 546 | VPusUfsgdTu(Tgn)cug | CACGCUGAGAACAGC | 990 |
| 1565497.1 | 2894065.1 | | CfAfgcagaaacsasa | 2894066.1 | | cuguUfcUfcagcgsusg | AGAAACAA | |
| AD- | A- | 103 | gscsugag(Ahd)aCfAf | A- | 547 | VPusUfsugdTu(Tgn)cu | ACGCUGAGAACAGCA | 991 |
| 1565498.1 | 2894067.1 | | Gfcagaaacasasa | 2894068.1 | | gcugUfuCfucagcsgsu | GAAACAAU | |
| AD- | A- | 104 | csusgag(Ahd)AfcAf | A- | 548 | VPusAfsuudGu(Tgn)uc | CGCUGAGAACAGCAG | 992 |
| 1565499.1 | 2894069.1 | | GfCfagaaacaasusa | 2894070.1 | | ugcuGfuUfcucagscsg | AAACAAUU | |
| AD- | A- | 105 | usgsaga(Ahd)CfaGf | A- | 549 | VPusAfsaudTg(Tgn)uu | GCUGAGAACAGCAGA | 993 |
| 1565500.1 | 2894071.1 | | CfAfgaaacaaususa | 2894072.1 | | cugcUfgUfucucasgsc | AACAAUUA | |
| AD- | A- | 106 | gsasgaa(Chd)AfgCf | A- | 550 | VPusUfsaadTu(G2p)uu | CUGAGAACAGCAGAA | 994 |
| 1565726.1 | 2894483.1 | | AfGfaaacaauusasa | 2894484.1 | | ucugCfuGfuucucsasg | ACAAUUAC | |
| AD- | A- | 107 | asgsaac(Ahd)GfcAf | A- | 551 | VPusGfsuadAu(Tgn)gu | UGAGAACAGCAGAAA | 995 |
| 1565501.1 | 2894073.1 | | GfAfaacaauuascsa | 2894074.1 | | uucuGfcUfguucuscsa | CAAUUACU | |
| AD- | A- | 108 | asgsaac(Ahd)gcAfGf | A- | 552 | VPusdGsuadAudTguu | UGAGAACAGCAGAAA | 996 |
| 1565502.1 | 2894075.1 | | Afaacaauuascsa | 2894076.1 | | udCuGfcuguucuscsa | CAAUUACU | |
| AD- | A- | 109 | gsasacag(Chd)aGfAf | A- | 553 | VPusdAsgudAadTuguu | GAGAACAGCAGAAAC | 997 |
| 1565503.1 | 2894077.1 | | Afacaauuacsusa | 2894078.1 | | dTcUfgcuguucsusc | AAUUACUG | |
| AD- | A- | 110 | asascag(Chd)AfgAf | A- | 554 | VPusCfsagdTa(Agn)uu | AGAACAGCAGAAACA | 998 |
| 1565801 | 1991726.1 | | AfAfcaauuacusgsa | 2894595.1 | | guuuCfuGfcuguuscsu | AUUACUGG | |
| AD | A- | 111 | asascag(Chd)AfgAf | A- | 555 | VPusCfsagdTa(A2p)uu | AGAACAGCAGAAACA | 999 |
| 1565802.1 | 1991726.1 | | AfAfcaauuacusgsa | 2894596.1 | | guuuCfuGfcuguuscsu | AUUACUGG | |
| AD- | A- | 112 | asascac(Chd)AfgAfA | A- | 556 | VPusdCsagdTadAuugu | AGAACAGCAGAAACA | 1000 |
| 1565803.1 | 2894597.1 | | fAfcaauuacusgsa | 2894598.1 | | dTuCfugguguuscsu | AUUACUGG | |
| AD- | A- | 113 | asascug(Chd)AfgAf | A- | 557 | VPusdCsagdTadAuugu | AGAACAGCAGAAACA | 1001 |
| 1565804.1 | 2894599.1 | | AfAfcaauuacusgsa | 2894600.1 | | dTuCfugcaguuscsu | AUUACUGG | |
| AD- | A- | 114 | asasgag(Chd)AfgAf | A- | 558 | VPusdCsagdTadAuugu | AGAACAGCAGAAACA | 1002 |
| 1565805.1 | 2894601.1 | | AfAfcaauuacusgsa | 2894602.1 | | dTuCfugcucuuscsu | AUUACUGG | |
| AD- | A- | 115 | asascag(Chd)AfgAf | A- | 559 | VPusCfsaguAfaUfUfgu | AGAACAGCAGAAACA | 1003 |
| 1073418.5 | 1991726.1 | | AfAfcaauuacusgsa | 1802980.1 | | uuCfuGfcuguuscsu | AUUACUGG | |
| AD- | A- | 116 | asascag(Chd)agAfAf | A- | 560 | VPusdCsagdTadAuugu | AGAACAGCAGAAACA | 1004 |
| 1565504.1 | 2894079.1 | | Afcaauuacusgsa | 2894080.1 | | dTuCfugcuguuscsu | AUUACUGG | |
| AD- | A- | 117 | asascag(Chd)agAfAf | A- | 561 | VPusdCsagdTadAuugu | AGAACAGCAGAAACA | 1005 |
| 1565504.2 | 2894079.1 | | Afcaauuacusgsa | 2894080.1 | | dTuCfugcuguuscsu | AUUACUGG | |
| AD- | A- | 118 | ascsagc(Ahd)gaAfAf | A- | 562 | VPusdCscadGudAauug | GAACAGCAGAAACAA | 1006 |
| 1565505.1 | 2894081.1 | | Cfaauuacugsgsa | 2894082.1 | | dTuUfcugcugususc | UUACUGGC | |
| AD- | A- | 119 | csasgc(Ahd)gAfAfAf | A- | 563 | VPusdCsagdTadAuugu | AACAGCAGAAACAAU | 1007 |
| 1565800.1 | 2894593.1 | | caauuacusgsa | 2894594.1 | | dTuCfugcugsusu | UACUGG | |
| AD- | A- | 120 | csasgcag(Ahd)aAfCf | A- | 564 | VPusGfsccdAg(Tgn)aa | AACAGCAGAAACAAU | 1008 |
| 1565506.1 | 2894083.1 | | Afauuacuggscsa | 2894084.1 | | uuguUfuCfugcugsusu | UACUGGCA | |
| AD- | A- | 121 | asgscag(Ahd)AfaCf | A- | 565 | VPusUfsgcdCa(G2p)ua | ACAGCAGAAACAAUU | 1009 |
| 1565727.1 | 2894485.1 | | AfAfuuacuggcsasa | 2894486.1 | | auugUfuUfcugcusgsu | ACUGGCAA | |
| AD- | A- | 122 | gscsaga(Ahd)AfcAf | A- | 566 | VPusUfsugdCc(Agn)gu | CAGCAGAAACAAUUA | 1010 |
| 1565507.1 | 2894085.1 | | AfUfuacuggcasasa | 2894086.1 | | aauuGfuUfucugcsusg | CUGGCAAG | |
| AD- | A- | 123 | csasgaa(Ahd)CfaAf | A- | 567 | VPusCfsuudGc(C2p)ag | AGCAGAAACAAUUAC | 1011 |
| 1565728.1 | 1577510.1 | | UfUfacuggcaasgsa | 2894487.1 | | uaauUfgUfuucugscsu | UGGCAAGU | |
| AD- | A- | 124 | csasgaa(Ahd)CfaAf | A- | 568 | VPusCfsuugdCc(Agn)g | AGCAGAAACAAUUAC | 1012 |
| 1565508.1 | 1577510.1 | | UfUfacuggcaasgsa | 2894087.1 | | uaauUfgUfuucugscsu | UGGCAAGU | |
| AD- | A | 125 | asgsaaa(Chd)AfaUf | A- | 569 | VPusAfscudTgdAcagu | GCAGAAACAAUUACU | 1013 |
| 1565509.1 | 2894088.1 | | UfAfcugucaagsusa | 2894089.1 | | aaUfuGfuuucusgsc | GGCAAGUA | |
| AD- | A- | 126 | gsasaac(Ahd)AfuUf | A- | 570 | VPusUfsacdTu(G2p)cc | CAGAAACAAUUACUG | 1014 |
| 1565730.1 | 2894490.1 | | AfCfuggcaagusasa | 2894491.1 | | aguaAfuUfguuucsusg | GCAAGUAU | |
| AD- | A- | 127 | asasaca(Ahd)UfuAf | A- | 571 | VPusAfsuadCu(Tgn)gc | AGAAACAAUUACUGG | 1015 |
| 1565510.1 | 2894090.1 | | CfUfggcaaguasusa | 2894091.1 | | caguAfaUfuguuuscsu | CAAGUAUG | |
| AD- | A- | 128 | asascaa(Uhd)UfaCf | A- | 572 | VPusCfsaudAc(Tgn)ug | GAAACAAUUACUGGC | 1016 |
| 1565511.1 | 2894092.1 | | UfGfgcaaguausgsa | 2894093.1 | | ccagUfaAfuuguususc | AAGUAUGG | |
| AD- | A- | 129 | asascaa(Uhd)uaCfU | A- | 573 | VPusdCsaudAcdTugcc | GAAACAAUUACUGGC | 1017 |
| 1565512.1 | 2894094.1 | | fGfgcaaguausgsa | 2894095.1 | | dAgUfaauuguususc | AAGUAUGG | |
| AD- | A- | 130 | gsgscaag(Uhd)aUfG | A- | 574 | VPusAfsucdCa(C2p)ac | CUGGCAAGUAUGGUG | 1018 |
| 1565731.1 | 2894096.1 | | fGfuguguggasusa | 2894492.1 | | accaUfaCfuugccsasg | UGUGGAUG | |
| AD- | A- | 131 | gsgscaag(Uhd)aUfG | A- | 575 | VPusAfsudCc(Agn)cac | CUGGCAAGUAUGGUG | 1019 |
| 1565513.1 | 2894096.1 | | fGfuguguggasusa | 2894097.1 | | accaUfaCfuugccsasg | UGUGGAUG | |
| AD- | A- | 132 | gsgscaag(Uhd)aUfG | A- | 576 | VPusAfsuccdAc(Agn)c | CUGGCAAGUAUGGUG | 1020 |
| 1565514.1 | 2894096.1 | | fGfuguguggasusa | 2894098.1 | | accaUfaCfuugccsasg | UGUGGAUG | |
| AD- | A- | 133 | csasagu(Ahd)UfgGf | A- | 577 | VPusGfscadTc(C2p)ac | GGCAAGUAUGGUGU | 1021 |
| 1565732.1 | 2894099.1 | | UfGfuguggaugscsa | 2894493.1 | | acacCfaUfacuugscsc | GUGGAUGCG | |
| AD- | A- | 134 | csasagu(Ahd)UfgGf | A- | 578 | VPusGfscaudCc(Agn)c | GGCAAGUAUGGUGU | 1022 |
| 1565515.1 | 2894099.1 | | UfGfuguggaugscsa | 2894100.1 | | acacCfaUfacuugscsc | GUGGAUGCG | |
| AD- | A- | 135 | usgsagu(Ahd)UfgAf | A- | 579 | VPusGfsgcdTg(Agn)ug | UUUGAGUAUGACCUC | 1023 |
| 1565516.1 | 2894101.1 | | CfCfucaucagcscsa | 2894102.1 | | agguCfaUfacucasasa | AUCAGCCA | |
| AD- | A- | 136 | gsasgua(Uhd)GfaCf | A- | 580 | VPusUfsggdCu(G2p)au | UUGAGUAUGACCUCA | 1024 |
| 1565733.1 | 2894494.1 | | CfUfcaucagccsasa | 2894495.1 | | gaggUfcAfuacucsasa | UCAGCCAG | |
| AD- | A- | 137 | asgsuaug(Ahd)cCfU | A- | 581 | VPusCfsugdGc(Tgn)ga | UGAGUAUGACCUCAU | 1025 |
| 1565517.1 | 2894103.1 | | fCfaucagccasgsa | 2894104.1 | | ugagGfuCfauacuscsa | CAGCCAGU | |
| AD- | A- | 138 | gsusaug(Ahd)CfcUf | A- | 582 | VPusAfscudGg(C2p)ug | GAGUAUGACCUCAUC | 1026 |
| 1565734.1 | 2894105.1 | | CfAfucagccagsusa | 2894496.1 | | augaGfgUfcauacsusc | AGCCAGUU | |
| AD- | A- | 139 | gsusaug(Ahd)CfcUf | A- | 583 | VPusAfscugdGc(Tgn)g | GAGUAUGACCUCAUC | 1027 |
| 1565518.1 | 2894105.1 | | CfAfucagccagsusa | 2894106.1 | | augaGfgUfcauacsusc | AGCCAGUU | |
| AD- | A- | 140 | usasuga(Chd)CfuCf | A- | 584 | VPusAfsacdTg(G2p)cu | AGUAUGACCUCAUCA | 1028 |
| 1565735.1 | 2894497.1 | | AfUfcagccagususa | 2894498.1 | | gaugAfgGfucauascsu | GCCAGUUU | |
| AD- | A- | 141 | asusgac(Chd)UfcAf | A- | 585 | VPusAfsaadCu(G2p)gc | GUAUGACCUCAUCAG | 1029 |
| 1565736.1 | 2894499.1 | | UfCfagccaguususa | 2894500.1 | | ugauGfaGfgucausasc | CCAGUUUA | |
| AD- | A- | 142 | usgsacc(Uhd)CfaUf | A- | 586 | VPusUfsaadAc(Tgn)gg | UAUGACCUCAUCAGC | 1030 |
| 1565519.1 | 2894107.1 | | CfAfgccaguuusasa | 2894108.1 | | cugaUfgAfggucasusa | CAGUUUAU | |
| AD- | A- | 143 | gsasccu(Chd)auCfAf | A- | 587 | VPusdAsuadAadCuggc | AUGACCUCAUCAGCC | 1031 |
| 1565520.1 | 2894109.1 | | Gfccaguuuasusa | 2894110.1 | | dTgAfugaggucsasu | AGUUUAUG | |
| AD- | A- | 144 | ascscuc(Ahd)ucAfGf | A- | 588 | VPusdCsaudAadAcugg | UGACCUCAUCAGCCA | 1032 |
| 1565521.1 | 2894111.1 | | Cfcaguuuausgsa | 2894112.1 | | dCuGfaugagguscsa | GUUUAUGC | |
| AD- | A- | 145 | cscsuca(Uhd)CfaGf | A- | 589 | VPusGfscauAfaAfCfug | GACCUCAUCAGCCAG | 1033 |
| 1244360.3 | 2298063.1 | | CfCfaguuuaugscsa | 1803173.1 | | gcUfgAfugaggsusc | UUUAUGCA | |
| AD- | A- | 146 | cscsuca(Uhd)caGfCf | A- | 590 | VPusdGscadTadAacug | GACCUCAUCAGCCAG | 1034 |
| 1565522.1 | 2894113.1 | | Cfaguuuaugscsa | 2894114.1 | | dGcUfgaugaggsusc | UUUAUGCA | |
| AD- | A- | 147 | cscsuca(Uhd)CfaGf | A- | 591 | VPusGfscadTa(Agn)ac | GACCUCAUCAGCCAG | 1035 |
| 1565806.1 | 2298063.1 | | CfCfaguuuaugscsa | 2894603.1 | | uggcUfgAfugaggsusc | UUUAUGCA | |
| AD- | A- | 148 | cscsuca(Uhd)CfaGf | A- | 592 | VPusGfscadTa(A2p)ac | GACCUCAUCAGCCAG | 1036 |
| 1565807.1 | 2298063.1 | | CfCfaguuuaugscsa | 2894604.1 | | uggcUfgAfugaggsusc | UUUAUGCA | |
| AD- | A- | 149 | cscsuca(Uhd)caGfCf | A- | 593 | VPusdGscadTa(Agn)ac | GACCUCAUCAGCCAG | 1037 |
| 1565808.1 | 2894113.1 | | Cfaguuuaugscsa | 2894605.1 | | ugdGcUfgaugaggsusc | UUUAUGCA | |
| AD- | A- | 150 | cscsuca(Uhd)cagCf | A- | 594 | VPusGfscadTa(Agn)ac | GACCUCAUCAGCCAG | 1038 |
| 1565809.1 | 2894606.1 | | CfAfguuuaugscsa | 2894603.1 | | uggcUfgAfugaggsusc | UUUAUGCA | |
| AD- | A- | 151 | cscsuca(Uhd)cagCf | A- | 595 | VPusdGscadTa(Agn)ac | GACCUCAUCAGCCAG | 1039 |
| 1565810.1 | 2894607.1 | | CfdAguuuaugscsa | 2894608.1 | | ugdGcUfgAfugaggsusc | UUUAUGCA | |
| AD- | A- | 152 | cscsucu(Uhd)CfaGf | A- | 596 | VPusGfscadTa(Agn)ac | GACCUCAUCAGCCAG | 1040 |
| 1565812.1 | 2894611.1 | | CfCfaguuuaugscsa | 2894612.1 | | uggcUfgAfagaggsusc | UUUAUGCA | |
| AD- | A- | 153 | cscsuga(Uhd)CfaGf | A- | 597 | VPusGfscadTa(Agn)ac | GACCUCAUCAGCCAG | 1041 |
| 1565813.1 | 2894613.1 | | CfCfaguuuaugscsa | 2894614.1 | | uggcUfgAfucaggsusc | UUUAUGCA | |
| AD- | A- | 154 | cscsaca(Uhd)CfaGf | A- | 598 | VPusGfscadTa(Agn)ac | GACCUCAUCAGCCAG | 1042 |
| 1565814.3 | 2894615.1 | | CfCfaguuuaugscsa | 2894616.1 | | uggcUfgAfuguggsusc | UUUAUGCA | |
| AD- | A- | 155 | cscsuca(Uhd)caGfCf | A- | 599 | VPusdGscadTadAacug | GACCUCAUCAGCCAG | 1043 |
| 1565522.2 | 2894113.1 | | Cfaguuuaugscsa | 2894114.1 | | dGcUfgaugaggsusc | UUUAUGCA | |
| AD- | A- | 156 | csuscau(Chd)agCfCf | A- | 600 | VPusdTsgcdAudAaacu | ACCUCAUCAGCCAGU | 1044 |
| 1565523.1 | 2894115.1 | | Afguuuaugcsasa | 2894116.1 | | dGgCfugaugagsgsu | UUAUGCAG | |
| AD- | A- | 157 | uscsauc(Ahd)GfCfCf | A- | 601 | VPusGfscadTa(Agn)ac | CCUCAUCAGCCAGUU | 1045 |
| 1565811.1 | 2894609.1 | | aguuuaugscsa | 2894610.1 | | uggcUfgAfugasgsg | UAUGCA | |
| AD- | A- | 158 | uscsauc(Ahd)GfcCf | A- | 602 | VPusCfsugdCa(Tgn)aa | CCUCAUCAGCCAGUU | 1046 |
| 1565524.1 | 2894117.1 | | AfGfuuuaugcasgsa | 2894118.1 | | acugGfcUfgaugasgsg | UAUGCAGG | |
| AD- | A- | 159 | uscsauc(Ahd)gcCfAf | A- | 603 | VPusdCsugdCadTaaac | CCUCAUCAGCCAGUU | 1047 |
| 1565525.1 | 2894119.1 | | Gfuuuaugcasgsa | 2894120.1 | | dTgGfcugaugasgsg | UAUGCAGG | |
| AD- | A- | 160 | csasucag(Chd)cAfGf | A- | 604 | VPusCfscudGc(Agn)ua | CUCAUCAGCCAGUUU | 1048 |
| 1565526.1 | 2894121.1 | | Ufuuaugcagsgsa | 2894122.1 | | aacuGfgCfugaugsasg | AUGCAGGG | |
| AD- | A- | 161 | asuscag(Chd)CfaGf | A- | 605 | VPusCfsccdTg(C2p)au | UCAUCAGCCAGUUUA | 1049 |
| 1565737.1 | 2894123.1 | | UfUfuaugcaggsgsa | 2894501.1 | | aaacUfgGfcugausgsa | UGCAGGGC | |
| AD- | A- | 162 | asuscag(Chd)CfaGf | A- | 606 | VPusCfsccudGc(Agn)u | UCAUCAGCCAGUUUA | 1050 |
| 1565527.1 | 2894123.1 | | UfUfuaugcaggsgsa | 2894124.1 | | aaacUfgGfcugausgsa | UGCAGGGC | |
| AD- | A- | 163 | uscsagc(Chd)AfgUf | A- | 607 | VPusGfsccdCu(G2p)ca | CAUCAGCCAGUUUAU | 1051 |
| 1565738.1 | 2894502.1 | | UfUfaugcagggscsa | 2894503.1 | | uaaaCfuGfgcugasusg | GCAGGGCU | |
| AD- | A- | 164 | csasgcc(Ahd)GfuUf | A- | 608 | VPusAfsgcdCc(Tgn)gca | AUCAGCCAGUUUAUG | 1052 |
| 1565528.1 | 2894125.1 | | UfAfugcagggcsusa | 2894126.1 | | uaaAfcUfggcugsasu | CAGGGCUA | |
| AD- | A- | 165 | asgsccag(Uhd)uUfA | A- | 609 | VPusUfsagdCc(C2p)ug | UCAGCCAGUUUAUGC | 1053 |
| 1565739.1 | 2894127.1 | | fUfgcagggcusasa | 2894504.1 | | cauaAfaCfuggcusgsa | AGGGCUAC | |
| AD- | A- | 166 | asgsccag(Uhd)uUfA | A- | 610 | VPusUfsagcdCc(Tgn)g | UCAGCCAGUUUAUGC | 1054 |
| 1565529.1 | 2894127.1 | | fUfgcagggcusasa | 2894128.1 | | cauaAfaCfuggcusgsa | AGGGCUAC | |
| AD- | A- | 167 | gscscag(Uhd)UfuAf | A- | 611 | VPusGfsuadGc(C2p)cu | CAGCCAGUUUAUGCA | 1055 |
| 1565740.1 | 2894505.1 | | UfGfcagggcuascsa | 2894506.1 | | gcauAfaAfcuggcsusg | GGGCUACC | |
| AD- | A- | 168 | gscscag(Uhd)UfuAf | A- | 612 | VPusGfsuadGcdAcugc | CAGCCAGUUUAUGCA | 1056 |
| 1565530.1 | 2894129.1 | | UfGfcagugcuascsa | 2894130.1 | | auAfaAfcuggcsusg | GGGCUACC | |
| AD- | A- | 169 | cscsagu(Uhd)UfaUf | A- | 613 | VPusGfsgudAg(C2p)cc | AGCCAGUUUAUGCAG | 1057 |
| 1565741.1 | 2894507.1 | | GfCfagggcuacscsa | 2894508.1 | | ugcaUfaAfacuggscsu | GGCUACCC | |
| AD- | A- | 170 | cscsagu(Uhd)UfaUf | A- | 614 | VPusGfsgudAgdAccug | AGCCAGUUUAUGCAG | 1058 |
| 1565531.1 | 2894131.1 | | GfCfaggucuacscsa | 2894132.1 | | caUfaAfacuggscsu | GGCUACCC | |
| AD- | A- | 171 | usgscagggcUfAfCfcc | A- | 615 | VPusdCsuudAgdAaggg | UAUGCAGGGCUACCC | 1059 |
| 1565532.1 | 2894133.1 | | uu(Chd)uaasgsa | 2894134.1 | | dTaGfcccugcasusa | UUCUAAGG | |
| AD- | A- | 172 | gsgsgug(Chd)UfgUf | A- | 616 | VPusCfscgdAg(Tgn)ac | ACGGGUGCUGUGGU | 1060 |
| 1565533.1 | 2894135.1 | | GfGfuguacucgsgsa | 2894136.1 | | accaCfaGfcacccsgsu | GUACUCGGG | |
| AD- | A- | 173 | gsgsgug(Chd)ugUfG | A- | 617 | VPusdCscgdAgdTacac | ACGGGUGCUGUGGU | 1061 |
| 1565534.1 | 2894137.1 | | fGfuguacucgsgsa | 2894138.1 | | dCaCfagcacccsgsu | GUACUCGGG | |
| AD- | A- | 174 | gsasgcc(Uhd)CfuAf | A- | 618 | VPusCfsgcdCc(Tgn)gga | GGGAGCCUCUAUUUC | 1062 |
| 1565535.1 | 2894139.1 | | UfUfuccagggcsgsa | 2894140.1 | | aauAfgAfggcucscsc | CAGGGCGC | |
| AD- | A- | 175 | gsasgcc(Uhd)cuAfU | A- | 619 | VPusdCsgcdCcdTggaa | GGGAGCCUCUAUUUC | 1063 |
| 1565536.1 | 2894141.1 | | fUfuccagggcsgsa | 2894142.1 | | dAuAfgaggcucscsc | CAGGGCGC | |
| AD- | A- | 176 | cscsucu(Ahd)uuUfC | A- | 620 | VPusdCsagdCgdCccug | AGCCUCUAUUUCCAG | 1064 |
| 1565537.1 | 2894143.1 | | fCfagggcgcusgsa | 2894144.1 | | dGaAfauagaggscsu | GGCGCUGA | |
| AD- | A- | 177 | ususcc(Ahd)gGfgCf | A- | 621 | VPusCfsugdGa(C2p)uc | AUUUCCAGGGCGCUG | 1065 |
| 1565742.1 | 2894145.1 | | GfCfugaguccasgsa | 2894509.1 | | agcgCfcCfuggaasasu | AGUCCAGA | |
| AD- | A- | 178 | ususcc(Ahd)gGfgCf | A- | 622 | VPusCfsudGg(Agn)cuc | AUUUCCAGGGCGCUG | 1066 |
| 1565538.1 | 2894145.1 | | GfCfugaguccasgsa | 2894146.1 | | agcgCfcCfuggaasasu | AGUCCAGA | |
| AD- | A- | 179 | ususcc(Ahd)gGfgCf | A- | 623 | VPusCfsuggdAc(Tgn)c | AUUUCCAGGGCGCUG | 1067 |
| 1565539.1 | 2894145.1 | | GfCfugaguccasgsa | 2894147.1 | | agcgCfcCfuggaasasu | AGUCCAGA | |
| AD- | A- | 180 | asgsggcg(Chd)uGfA | A- | 624 | VPusAfsgudTc(Tgn)gg | CCAGGGCGCUGAGUC | 1068 |
| 1565540.1 | 2894148.1 | | fGfuccagaacsusa | 2894149.1 | | acucAfgCfgcccusgsg | CAGAACUG | |
| AD- | A- | 181 | gsgsgcg(Chd)UfgAf | A- | 625 | VPusCfsagdTu(C2p)ug | CAGGGCGCUGAGUCC | 1069 |
| 1565743.1 | 2894150.1 | | GfUfccagaacusgsa | 2894510.1 | | gacuCfaGfcgcccsusg | AGAACUGU | |
| AD- | A- | 182 | gsgsgcg(Chd)UfgAf | A- | 626 | VPusCfsadGu(Tgn)cug | CAGGGCGCUGAGUCC | 1070 |
| 1565541.1 | 2894150.1 | | GfUfccagaacusgsa | 2894151.1 | | gacuCfaGfcgcccsusg | AGAACUGU | |
| AD- | A- | 183 | gsgsgcg(Chd)ugAfG | A- | 627 | VPusdCsagdTudCugga | CAGGGCGCUGAGUCC | 1071 |
| 1565542.1 | 2894152.1 | | fUfccagaacusgsa | 2894153.1 | | dCuCfagcgcccsusg | AGAACUGU | |
| AD- | A- | 184 | gsgscgc(Uhd)GfaGf | A- | 628 | VPusAfscadGu(Tgn)cu | AGGGCGCUGAGUCCA | 1072 |
| 1565543.1 | 2894154.1 | | UfCfcagaacugsusa | 2894155.1 | | ggacUfcAfgcgccscsu | GAACUGUC | |
| AD- | A- | 185 | gscsgcug(Ahd)gUfCf | A- | 629 | VPusGfsacdAg(Tgn)uc | GGGCGCUGAGUCCAG | 1073 |
| 1565544.1 | 2894156.1 | | Cfagaacuguscsa | 2894157.1 | | uggaCfuCfagcgcscsc | AACUGUCA | |
| AD- | A- | 186 | csgscug(Ahd)GfuCf | A- | 630 | VPusUfsgadCa(G2p)uu | GGCGCUGAGUCCAGA | 1074 |
| 1565744.1 | 2894511.1 | | CfAfgaacugucsasa | 2894512.1 | | cuggAfcUfcagcgscsc | ACUGUCAU | |
| AD- | A- | 187 | gscsugag(Uhd)cCfAf | A- | 631 | VPusAfsugdAc(Agn)gu | GCGCUGAGUCCAGAA | 1075 |
| 1565545.1 | 2894158.1 | | Gfaacugucasusa | 2894159.1 | | ucugGfaCfucagcsgsc | CUGUCAUA | |
| AD- | A- | 188 | csusgag(Uhd)CfcAf | A- | 632 | VPusUfsaudGa(C2p)ag | CGCUGAGUCCAGAAC | 1076 |
| 1565745.1 | 1577552.1 | | GfAfacugucausasa | 2894513.1 | | uucuGfgAfcucagscsg | UGUCAUAA | |
| AD- | A- | 189 | csusgag(Uhd)CfcAf | A- | 633 | VPusUfsadTg(Agn)cag | CGCUGAGUCCAGAAC | 1077 |
| 1565546.1 | 1577552.1 | | GfAfacugucausasa | 2894160.1 | | uucuGfgAfcucagscsg | UGUCAUAA | |
| AD- | A- | 190 | csusgag(Uhd)CfcAf | A- | 634 | VPusUfsaugdAc(Agn)g | CGCUGAGUCCAGAAC | 1078 |
| 1565547.1 | 1577552.1 | | GfAfacugucausasa | 2894161.1 | | uucuGfgAfcucagscsg | UGUCAUAA | |
| AD- | A- | 191 | usgsagu(Chd)CfaGf | A- | 635 | VPusUfsuadTg(Agn)ca | GCUGAGUCCAGAACU | 1079 |
| 1565548.1 | 2894162.1 | | AfAfcugucauasasa | 2894163.1 | | guucUfgGfacucasgsc | GUCAUAAG | |
| AD- | A- | 192 | gsasguc(Chd)AfgAf | A- | 636 | VPusCfsuudAu(G2p)ac | CUGAGUCCAGAACUG | 1080 |
| 1565746.1 | 1577518.1 | | AfCfugucauaasgsa | 2894514.1 | | aguuCfuGfgacucsasg | UCAUAAGA | |
| AD- | A- | 193 | gsasguc(Chd)agAfAf | A- | 637 | VPusdCsuudAudGacag | CUGAGUCCAGAACUG | 1081 |
| 1565549 | 2894164.1 | | Cfugucauaasgsa | 2894165.1 | | dTuCfuggacucsasg | UCAUAAGA | |
| AD- | A- | 194 | asgsucc(Ahd)GfaAf | A- | 638 | VPusUfscudTa(Tgn)ga | UGAGUCCAGAACUGU | 1082 |
| 1565550.1 | 2894166.1 | | CfUfgucauaagsasa | 2894167.1 | | caguUfcUfggacuscsa | CAUAAGAU | |
| AD- | A- | 195 | asgsucc(Ahd)gaAfCf | A- | 639 | VPusdTscudTadTgaca | UGAGUCCAGAACUGU | 1083 |
| 1565551.1 | 2894168.1 | | Ufgucauaagsasa | 2894169.1 | | dGuUfcuggacuscsa | CAUAAGAU | |
| AD- | A- | 196 | gsuscca(Ghd)AfaCf | A- | 640 | VPusAfsucuUfaUfGfac | GAGUCCAGAACUGUC | 1084 |
| 1244365.3 | 2324726.1 | | UfGfucauaagasusa | 1803353.1 | | agUfuCfuggacsusc | AUAAGAUA | |
| AD- | A- | 197 | gsusccag(Ahd)aCfUf | A- | 641 | VPusAfsucdTu(Agn)ug | GAGUCCAGAACUGUC | 1085 |
| 1565552.1 | 2894170.1 | | Gfucauaagasusa | 2894171.1 | | acagUfuCfuggacsusc | AUAAGAUA | |
| AD- | A- | 198 | gsusccag(Ahd)aCfUf | A- | 642 | VPusdAsucdTudAugac | GAGUCCAGAACUGUC | 1086 |
| 1565553.1 | 2894170.1 | | Gfucauaagasusa | 2894172.1 | | dAgUfucuggacsusc | AUAAGAUA | |
| AD- | A- | 232 | cscsaaa(Chd)UfgAf | A- | 676 | VPusAfsuucdTc(Tgn)g | CUCCAAACUGAACCCA | 1120 |
| 1565575.1 | 2894211.1 | | AfCfccagagaasusa | 2894213.1 | | gguuCfaGfuuuggsasg | GAGAAUC | |
| AD- | A- | 233 | csasaac(Uhd)GfaAf | A- | 677 | VPusGfsaudTc(Tgn)cu | UCCAAACUGAACCCA | 1121 |
| 1565576.1 | 2894214.1 | | CfCfcagagaauscsa | 2894215.1 | | ggguUfcAfguuugsgsa | GAGAAUCU | |
| AD- | A- | 234 | uscscgu(Ahd)AfgCf | A- | 678 | VPusGfsgcdGa(C2p)ug | CAUCCGUAAGCAGUC | 1122 |
| 1565752.1 | 2894216.1 | | AfGfucagucgcscsa | 2894521.1 | | acugCfuUfacggasusg | AGUCGCCA | |
| AD- | A- | 235 | uscscgu(Ahd)AfgCf | A- | 679 | VPusGfsgdCg(Agn)cug | CAUCCGUAAGCAGUC | 1123 |
| 1565577.1 | 2894216.1 | | AfGfucagucgcscsa | 2894217.1 | | acugCfuUfacggasusg | AGUCGCCA | |
| AD- | A- | 236 | uscscgu(Ahd)AfgCf | A- | 680 | VPusGfsgcgdAc(Tgn)g | CAUCCGUAAGCAGUC | 1124 |
| 1565578.1 | 2894216.1 | | AfGfucagucgcscsa | 2894218.1 | | acugCfuUfacggasusg | AGUCGCCA | |
| AD- | A- | 237 | uscscgu(Ahd)agCfAf | A- | 681 | VPusdGsgcdGadCugac | CAUCCGUAAGCAGUC | 1125 |
| 1565579.1 | 2894219.1 | | Gfucagucgcscsa | 2894220.1 | | dTgCfuuacggasusg | AGUCGCCA | |
| AD- | A- | 238 | usasagc(Ahd)GfuCf | A- | 682 | VPusCfsaudTg(G2p)cg | CGUAAGCAGUCAGUC | 1126 |
| 1565753.1 | 2894522.1 | | AfGfucgccaausgsa | 2894523.1 | | acugAfcUfgcuuascsg | GCCAAUGC | |
| AD- | A- | 239 | csasguc(Ahd)GfuCf | A- | 683 | VPusAfsagdGc(Agn)uu | AGCAGUCAGUCGCCA | 1127 |
| 1565580.1 | 2894221.1 | | GfCfcaaugccususa | 2894222.1 | | ggcgAfcUfgacugscsu | AUGCCUUC | |
| AD- | A- | 240 | uscsagu(Chd)GfcCf | A- | 684 | VPusAfsugdAa(G2p)gc | AGUCAGUCGCCAAUG | 1128 |
| 1565754.1 | 2894524.1 | | AfAfugccuucasusa | 2894525.1 | | auugGfcGfacugascsu | CCUUCAUC | |
| AD- | A- | 241 | asgsucg(Chd)CfaAf | A- | 685 | VPusUfsgadTg(Agn)ag | UCAGUCGCCAAUGCC | 1129 |
| 1565581.1 | 2894223.1 | | UfGfccuucaucsasa | 2894224.1 | | gcauUfgGfcgacusgsa | UUCAUCAU | |
| AD- | A- | 242 | gscscaa(Uhd)gcCfUf | A- | 686 | VPusdCsagdAudGauga | UCGCCAAUGCCUUCA | 1130 |
| 1565582.1 | 2894225.1 | | Ufcaucaucusgsa | 2894226.1 | | dAgGfcauuggcsgsa | UCAUCUGU | |
| AD- | A- | 243 | cscsuuc(Ahd)UfcAf | A- | 687 | VPusGfsgudGc(C2p)ac | UGCCUUCAUCAUCUG | 1131 |
| 1565755.1 | 2894227.1 | | UfCfuguggcacscsa | 2894526.1 | | agauGfaUfgaaggscsa | UGGCACCU | |
| AD- | A- | 244 | cscsuuc(Ahd)UfcAf | A- | 688 | VPusGfsgugdCc(Agn)c | UGCCUUCAUCAUCUG | 1132 |
| 1565583.1 | 2894227.1 | | UfCfuguggcacscsa | 2894228.1 | | agauGfaUfgaaggscsa | UGGCACCU | |
| AD- | A- | 245 | csusgugg(Chd)aCfCf | 2894230.1 | 689 | VPusCfsggdTg(Tgn)aca | AUCUGUGGCACCUUG | 1133 |
| 1565584.1 | 2894229.1 | | Ufuguacaccsgsa | | | aggUfgCfcacagsasu | UACACCGU | |
| AD- | A- | 246 | csusaccg(Uhd)cAfAf | A- | 690 | VPusAfsuadAg(C2p)aa | UGCUACCGUCAACUU | 1134 |
| 1565756.1 | 2894231.1 | | Cfuuugcuuasusa | 2894527.1 | | aguuGfaCfgguagscsa | UGCUUAUG | |
| AD- | A- | 247 | csusaccg(Uhd)cAfAf | A- | 691 | VPusAfsuaadGc(Agn)a | UGCUACCGUCAACUU | 1135 |
| 1565585.1 | 2894231.1 | | Cfuuugcuuasusa | 2894232.1 | | aguuGfaCfgguagscsa | UGCUUAUG | |
| AD- | A- | 248 | usasccg(Uhd)CfaAf | A- | 692 | VPusCfsauaa(Ggn)caa | GCUACCGUCAACUUU | 1136 |
| 1073420.3 | 1991728.1 | | CfUfuugcuuausgsa | 1806295.1 | | aguUfgAfcgguasgsc | GCUUAUGA | |
| AD- | A- | 249 | usasccg(Uhd)CfaAf | A- | 693 | VPusCfsauaAfgCfAfaa | GCUACCGUCAACUUU | 1137 |
| 1244366.3 | 1991728.1 | | CfUfuugcuuausgsa | 1803954.1 | | guUfgAfcgguasgsc | GCUUAUGA | |
| AD- | A- | 250 | usasccg(Uhd)CfaAf | A- | 694 | VPusCfsaudAa(G2p)ca | GCUACCGUCAACUUU | 1138 |
| 1565757.1 | 1991728.1 | | CfUfuugcuuausgsa | 2894528.1 | | aaguUfgAfcgguasgsc | GCUUAUGA | |
| AD- | A- | 251 | usasccg(Uhd)CfaAf | A- | 695 | VPusCfsadTa(Agn)gca | GCUACCGUCAACUUU | 1139 |
| 1565821.1 | 1991728.1 | | CfUfuugcuuausgsa | 2894627.1 | | aaguUfgAfcgguasgsc | GCUUAUGA | |
| AD- | A- | 252 | usasccg(Uhd)CfaAf | A- | 696 | VPusdCsaudAa(G2p)c | GCUACCGUCAACUUU | 1140 |
| 1565822.1 | 1991728.1 | | CfUfuugcuuausgsa | 2894628.1 | | aaadGuUfgAfcgguasgs | GCUUAUGA | |
| AD- | A- | 253 | usasccc(Uhd)CfaAf | A- | 697 | VPusCfsaudAa(G2p)ca | GCUACCGUCAACUUU | 1141 |
| 1565824.1 | 2894631.1 | | CfUfuugcuuausgsa | 2894632.1 | | aaguUfgAfggguasgsc | GCUUAUGA | |
| AD- | A- | 254 | usascgg(Uhd)CfaAf | A- | 698 | VPusCfsaudAa(G2p)ca | GCUACCGUCAACUUU | 1142 |
| 1565825.1 | 2894633.1 | | CfUfuugcuuausgsa | 2894634.1 | | aaguUfgAfccguasgsc | GCUUAUGA | |
| AD- | A- | 255 | usasgcg(Uhd)CfaAf | A- | 699 | VPusCfsaudAa(G2p)ca | GCUACCGUCAACUUU | 1143 |
| 1565826.1 | 2894635.1 | | CfUfuugcuuausgsa | 2894636.1 | | aaguUfgAfcgcuasgsc | GCUUAUGA | |
| AD- | A- | 256 | usasccg(Uhd)CfaAf | A- | 700 | VPusCfsaudAa(G2p)ca | GCUACCGUCAACUUU | 1144 |
| 1565757.2 | 1991728.1 | | CfUfuugcuuausgsa | 2894528.1 | | aaguUfgAfcgguasgsc | GCUUAUGA | |
| AD- | A- | 257 | usasccg(Uhd)caAfCf | A- | 701 | VPusdCsaudAadGcaaa | GCUACCGUCAACUUU | 1145 |
| 1565586.1 | 2894233.1 | | Ufuugcuuausgsa | 2894234.1 | | dGuUfgacgguasgsc | GCUUAUGA | |
| AD- | A- | 258 | ascscgu(Chd)AfaCf | A- | 702 | VPusUfscadTa(Agn)gc | CUACCGUCAACUUUG | 1146 |
| 1565587.1 | 2324727.1 | | UfUfugcuuaugsasa | 2894235.1 | | aaagUfuGfacggusasg | CUUAUGAC | |
| AD- | A- | 259 | ascscgu(Chd)aaCfUf | A- | 703 | VPusdTscadTadAgcaa | CUACCGUCAACUUUG | 1147 |
| 1565588.1 | 2894236.1 | | Ufugcuuaugsasa | 2894237.1 | | dAgUfugacggusasg | CUUAUGAC | |
| AD- | A- | 260 | cscsguc(Ahd)AfCfUf | A- | 704 | VPusCfsaudAa(G2p)ca | UACCGUCAACUUUGC | 1148 |
| 1565823.1 | 2894629.1 | | uugcuuausgsa | 2894630.1 | | aaguUfgAfcggsusg | UUAUGA | |
| AD- | A- | 261 | cscsguc(Ahd)acUfU | A- | 705 | VPusdGsucdAudAagca | UACCGUCAACUUUGC | 1149 |
| 1565589.1 | 2894238.1 | | fUfgcuuaugascsa | 2894239.1 | | dAaGfuugacggsusa | UUAUGACA | |
| AD- | A- | 262 | csgsuca(Ahd)CfuUf | A- | 706 | VPusUfsgudCa(Tgn)aa | ACCGUCAACUUUGCU | 1150 |
| 1565590.1 | 2894240.1 | | UfGfcuuaugacsasa | 2894241.1 | | gcaaAfgUfugacgsgsu | UAUGACAC | |
| AD- | A- | 263 | gsuscaa(Chd)UfuUf | A- | 707 | VPusGfsugdTc(Agn)ua | CCGUCAACUUUGCUU | 1151 |
| 1565591.1 | 2894242.1 | | GfCfuuaugacascsa | 2894243.1 | | agcaAfaGfuugacsgsg | AUGACACA | |
| AD- | A- | 264 | uscsaac(Uhd)UfuGf | A- | 708 | VPusUfsgudGu(C2p)a | CGUCAACUUUGCUUA | 1152 |
| 1565758.1 | 2894244.1 | | CfUfuaugacacsasa | 2894529.1 | | uaagcAfaAfguugascsg | UGACACAG | |
| AD- | A- | 265 | uscsaac(Uhd)UfuGf | A- | 709 | VPusUfsgdTg(Tgn)cau | CGUCAACUUUGCUUA | 1153 |
| 1565592.1 | 2894244.1 | | CfUfuaugacacsasa | 2894245.1 | | aagcAfaAfguugascsg | UGACACAG | |
| AD- | A- | 266 | csasacu(Uhd)UfgCf | A- | 710 | VPusCfsugdTg(Tgn)ca | GUCAACUUUGCUUAU | 1154 |
| 1565594.1 | 2894247.1 | | UfUfaugacacasgsa | 2894248.1 | | uaagCfaAfaguugsasc | GACACAGG | |
| AD- | A- | 267 | asascuu(Uhd)GfcUf | A- | 711 | VPusCfscudGu(G2p)uc | UCAACUUUGCUUAUG | 1155 |
| 1565759.1 | 2894530.1 | | UfAfugacacagsgsa | 2894531.1 | | auaaGfcAfaaguusgsa | ACACAGGC | |
| AD- | A- | 268 | ascsuuug(Chd)uUfA | A- | 712 | VPusGfsccdTg(Tgn)gu | CAACUUUGCUUAUGA | 1156 |
| 1565595.1 | 2894249.1 | | fUfgacacaggscsa | 2894250.1 | | cauaAfgCfaaagususg | CACAGGCA | |
| AD- | A- | 269 | csusuug(Chd)UfuAf | A- | 713 | VPusUfsgcdCu(G2p)ug | AACUUUGCUUAUGAC | 1157 |
| 1565760.1 | 2894532.1 | | UfGfacacaggcsasa | 2894533.1 | | ucauAfaGfcaaagsusu | ACAGGCAC | |
| AD- | A- | 270 | ascsagg(Chd)AfcAf | A- | 714 | VPusUfsugdCu(G2p)a | ACACAGGCACAGGUA | 1158 |
| 1565761.1 | 2894534.1 | | GfGfuaucagcasasa | 2894535.1 | | uaccuGfuGfccugusgsu | UCAGCAAG | |
| AD- | A- | 271 | asusaag(Uhd)AfcAf | A- | 715 | VPusAfsaudCa(Tgn)gc | CUAUAAGUACAGCAG | 1159 |
| 1565596.1 | 2894251.1 | | GfCfagcaugaususa | 2894252.1 | | ugcuGfuAfcuuausasg | CAUGAUUG | |
| AD- | A- | 272 | usasagu(Ahd)CfaGf | A- | 716 | VPusCfsaadTc(Agn)ug | UAUAAGUACAGCAGC | 1160 |
| 1565597.1 | 2894253.1 | | CfAfgcaugauusgsa | 2894254.1 | | cugcUfgUfacuuasusa | AUGAUUGA | |
| AD- | A- | 273 | asasgua(Chd)AfgCf | A- | 717 | VPusUfscadAu(C2p)au | AUAAGUACAGCAGCA | 1161 |
| 1565762.1 | 2894255.1 | | AfGfcaugauugsasa | 2894536.1 | | gcugCfuGfuacuusasu | UGAUUGAC | |
| AD- | A- | 274 | asasgua(Chd)AfgCf | A- | 718 | VPusUfscdAa(Tgn)cau | AUAAGUACAGCAGCA | 1162 |
| 1565598.1 | 2894255.1 | | AfGfcaugauugsasa | 2894256.1 | | gcugCfuGfuacuusasu | UGAUUGAC | |
| AD- | A- | 275 | asasgua(Chd)AfgCf | A- | 719 | VPusUfscaadTc(Agn)u | AUAAGUACAGCAGCA | 1163 |
| 1565599.1 | 2894255.1 | | AfGfcaugauugsasa | 2894257.1 | | gcugCfuGfuacuusasu | UGAUUGAC | |
| AD- | A- | 276 | asgsuac(Ahd)GfcAf | A- | 720 | VPusGfsucdAa(Tgn)ca | UAAGUACAGCAGCAU | 1164 |
| 1565600.1 | 2894258.1 | | GfCfaugauugascsa | 2894259.1 | | ugcuGfcUfguacususa | GAUUGACU | |
| AD- | A- | 277 | asgsuac(Ahd)gcAfG | A- | 721 | VPusdGsucdAadTcaug | UAAGUACAGCAGCAU | 1165 |
| 1565601.1 | 2894260.1 | | fCfaugauugascsa | 2894261.1 | | dCuGfcuguacususa | GAUUGACU | |
| AD- | A- | 278 | gsusacag(Chd)aGfCf | A- | 722 | VPusAfsgudCa(Agn)uc | AAGUACAGCAGCAUG | 1166 |
| 1565602.1 | 2894262.1 | | Afugauugacsusa | 2894263.1 | | augcUfgCfuguacsusu | AUUGACUA | |
| AD- | A- | 279 | gsusaca(Ghd)CfaGf | A- | 723 | VPusAfsgucAfaUfCfau | AAGUACAGCAGCAUG | 1167 |
| 1565827.1 | 2894637.1 | | CfAfugauugacsusa | 1804098.1 | | gcUfgCfuguacsusu | AUUGACUA | |
| AD- | A- | 280 | gsusacag(Chd)aGfCf | A- | 724 | VPusAfsgudCa(A2p)uc | AAGUACAGCAGCAUG | 1168 |
| 1565828.1 | 2894262.1 | | Afugauugacsusa | 2894638.1 | | augcUfgCfuguacsusu | AUUGACUA | |
| AD- | A- | 281 | gsusacag(Chd)aGfCf | A- | 725 | VPusdAsgudCadAucau | AAGUACAGCAGCAUG | 1169 |
| 1565829.1 | 2894262.1 | | Afugauugacsusa | 2894639.1 | | dGcUfgcuguacsusu | AUUGACUA | |
| AD- | A- | 282 | gsusacag(Chd)aGfCf | A- | 726 | VPusdAsgudCa(Agn)uc | AAGUACAGCAGCAUG | 1170 |
| 1565830.1 | 2894262.1 | | Afugauugacsusa | 2894640.1 | | augcUfgCfuguacsusu | AUUGACUA | |
| AD- | A- | 283 | gsusacag(Chd)aGfCf | A- | 727 | VPusdAsgudCa(Agn)uc | AAGUACAGCAGCAUG | 1171 |
| 1565831.1 | 2894262.1 | | Afugauugacsusa | 2894641.1 | | audGcUfgcuguacsusu | AUUGACUA | |
| AD- | A- | 284 | gsusacug(Chd)aGfC | A- | 728 | VPusdAsgudCa(Agn)uc | AAGUACAGCAGCAUG | 1172 |
| 1565833.1 | 2894644.1 | | fAfugauugacsusa | 2894645.1 | | augcUfgCfaguacsusu | AUUGACUA | |
| AD- | A- | 285 | gsusagag(Chd)aGfC | A- | 729 | VPusdAsgudCa(Agn)uc | AAGUACAGCAGCAUG | 1173 |
| 1565834.1 | 2894646.1 | | fAfugauugacsusa | 2894647.1 | | augcUfgCfucuacsusu | AUUGACUA | |
| AD- | A- | 286 | gsusucag(Chd)aGfC | A- | 730 | VPusdAsgudCa(Agn)uc | AAGUACAGCAGCAUG | 1174 |
| 1565835.3 | 2894648.1 | | fAfugauugacsusa | 2894649.1 | | augcUfgCfugaacsusu | AUUGACUA | |
| AD- | A- | 287 | gsusacag(Chd)aGfCf | A- | 731 | VPusAfsgudCa(Agn)uc | AAGUACAGCAGCAUG | 1175 |
| 1565602.2 | 2894262.1 | | Afugauugacsusa | 2894263.1 | | augcUfgCfuguacsusu | AUUGACUA | |
| AD- | A- | 288 | usascag(Chd)AfgCf | A- | 732 | VPusUfsagdTc(Agn)au | AGUACAGCAGCAUGA | 1176 |
| 1565603.1 | 2894264.1 | | AfUfgauugacusasa | 2894265.1 | | caugCfuGfcuguascsu | UUGACUAC | |
| AD- | A- | 289 | ascsag(Chd)aGfCfAf | A- | 733 | VPusdAsgudCa(Agn)uc | GUACAGCAGCAUGAU | 1177 |
| 1565832.1 | 2894642.1 | | ugauugacsusa | 2894643.1 | | augcUfgCfugusgsc | UGACUA | |
| AD- | A- | 290 | ascsagc(Ahd)GfcAf | A- | 734 | VPusGfsuadGu(C2p)aa | GUACAGCAGCAUGAU | 1178 |
| 1565763.1 | 2894266.1 | | UfGfauugacuascsa | 2894537.1 | | ucauGfcUfgcugusasc | UGACUACA | |
| AD- | A- | 291 | ascsagc(Ahd)GfcAf | A- | 735 | VPusGfsudAg(Tgn)caa | GUACAGCAGCAUGAU | 1179 |
| 1565604.1 | 2894266.1 | | UfGfauugacuascsa | 2894267.1 | | ucauGfcUfgcugusasc | UGACUACA | |
| AD- | A- | 292 | ascsagc(Ahd)GfcAf | A- | 736 | VPusGfsuagdTc(Agn)a | GUACAGCAGCAUGAU | 1180 |
| 1565605.1 | 2894266.1 | | UfGfauugacuascsa | 2894268.1 | | ucauGfcUfgcugusasc | UGACUACA | |
| AD- | A- | 293 | csasgcag(Chd)aUfG | A- | 737 | VPusUfsgudAg(Tgn)ca | UACAGCAGCAUGAUU | 1181 |
| 1565606.1 | 2894269.1 | | fAfuugacuacsasa | 2894270.1 | | aucaUfgCfugcugsusa | GACUACAA | |
| AD- | A- | 294 | asgscag(Chd)AfuGf | A- | 738 | VPusUfsugdTa(G2p)uc | ACAGCAGCAUGAUUG | 1182 |
| 1565764.1 | 2894538.1 | | AfUfugacuacasasa | 2894539.1 | | aaucAfuGfcugcusgsu | ACUACAAC | |
| AD- | A- | 295 | gscsagc(Ahd)UfgAf | A- | 739 | VPusGfsuudGu(Agn)g | CAGCAGCAUGAUUGA | 1183 |
| 1565607.1 | 2894271.1 | | UfUfgacuacaascsa | 2894272.1 | | ucaauCfaUfgcugcsusg | CUACAACC | |
| AD- | A- | 296 | csasgca(Uhd)GfaUf | A- | 740 | VPusGfsgudTg(Tgn)ag | AGCAGCAUGAUUGAC | 1184 |
| 1565608.1 | 2894273.1 | | UfGfacuacaacscsa | 2894274.1 | | ucaaUfcAfugcugscsu | UACAACCC | |
| AD- | A- | 297 | gscsaug(Ahd)UfuGf | A- | 741 | VPusGfsggdGu(Tgn)gu | CAGCAUGAUUGACUA | 1185 |
| 1565609.1 | 2894275.1 | | AfCfuacaacccscsa | 2894276.1 | | agucAfaUfcaugcsusg | CAACCCCC | |
| AD- | A- | 298 | asgscuc(Uhd)UfuGf | A- | 742 | VPusGfsuudGu(C2p)cc | GAAGCUCUUUGCCUG | 1186 |
| 1565766.1 | 2894279.1 | | CfCfugggacaascsa | 2894542.1 | | aggcAfaAfgagcususc | GGACAACU | |
| AD- | A- | 299 | asgscuc(Uhd)UfuGf | A- | 743 | VPusGfsudTg(Tgn)ccc | GAAGCUCUUUGCCUG | 1187 |
| 1565611.1 | 2894279.1 | | CfCfugggacaascsa | 2894280.1 | | aggcAfaAfgagcususc | GGACAACU | |
| AD- | A- | 300 | gscscuggGfaCfAfAfc | A- | 744 | VPusAfsugdTu(C2p)aa | UUGCCUGGGACAACU | 1188 |
| 1565767.1 | 2894281.1 | | uug(Ahd)acasusa | 2894543.1 | | guugUfcCfcaggcsasa | UGAACAUG | |
| AD- | A- | 301 | gscscuggGfaCfAfAfc | A- | 745 | VPusAfsudGu(Tgn)caa | UUGCCUGGGACAACU | 1189 |
| 1565612.1 | 2894281.1 | | uug(Ahd)acasusa | 2894282.1 | | guugUfcCfcaggcsasa | UGAACAUG | |
| AD- | A- | 302 | gscscuggGfaCfAfAfc | A- | 746 | VPusAfsugudTc(Agn)a | UUGCCUGGGACAACU | 1190 |
| 1565613.1 | 2894281.1 | | uug(Ahd)acasusa | 2894283.1 | | guugUfcCfcaggcsasa | UGAACAUG | |
| AD- | A- | 303 | csusggg(Ahd)CfaAf | A- | 747 | VPusCfscadTg(Tgn)uca | GCCUGGGACAACUUG | 1191 |
| 1565614.1 | 2894284.1 | | CfUfugaacaugsgsa | 2894285.1 | | aguUfgUfcccagsgsc | AACAUGGU | |
| AD- | A- | 304 | usgsgga(Chd)AfaCf | A- | 748 | VPusAfsccdAu(G2p)uu | CCUGGGACAACUUGA | 1192 |
| 1565768.1 | 2894544.1 | | UfUfgaacauggsusa | 2894545.1 | | caagUfuGfucccasgsg | ACAUGGUC | |
| AD- | A- | 305 | gsgsgac(Ahd)AfcUf | A- | 749 | VPusGfsacdCa(Tgn)gu | CUGGGACAACUUGAA | 1193 |
| 1565615.1 | 2894286.1 | | UfGfaacaugguscsa | 2894287.1 | | ucaaGfuUfgucccsasg | CAUGGUCA | |
| AD- | A- | 306 | gsgsgac(Ahd)acUfU | A- | 750 | VPusdGsacdCadTguuc | CUGGGACAACUUGAA | 1194 |
| 1565616.1 | 2894288.1 | | fGfaacaugguscsa | 2894289.1 | | dAaGfuugucccsasg | CAUGGUCA | |
| AD- | A- | 307 | gsgsaca(Ahd)CfuUf | A- | 751 | VPusUfsgadCc(Agn)ug | UGGGACAACUUGAAC | 1195 |
| 1565617.1 | 2894290.1 | | GfAfacauggucsasa | 2894291.1 | | uucaAfgUfuguccscsa | AUGGUCAC | |
| AD- | A- | 308 | gsascaa(Chd)UfuGf | A- | 752 | VPusGfsugdAc(C2p)au | GGGACAACUUGAACA | 1196 |
| 1565769.1 | 2894292.1 | | AfAfcauggucascsa | 2894546.1 | | guucAfaGfuugucscsc | UGGUCACU | |
| AD- | A- | 309 | gsascaa(Chd)UfuGf | A- | 753 | VPusGfsugadCc(Agn)u | GGGACAACUUGAACA | 1197 |
| 1565618.1 | 2894292.1 | | AfAfcauggucascsa | 2894293.1 | | guucAfaGfuugucscsc | UGGUCACU | |
| AD- | A- | 310 | ascsaac(Uhd)UfgAf | A- | 754 | VPusAfsgudGa(C2p)ca | GGACAACUUGAACAU | 1198 |
| 1565770.1 | 2894294.1 | | AfCfauggucacsusa | 2894547.1 | | uguuCfaAfguuguscsc | GGUCACUU | |
| AD- | A- | 311 | ascsaac(Uhd)UfgAf | A- | 755 | VPusAfsgdTg(Agn)cca | GGACAACUUGAACAU | 1199 |
| 1565619.1 | 2894294.1 | | AfCfauggucacsusa | 2894295.1 | | uguuCfaAfguuguscsc | GGUCACUU | |
| AD- | A- | 312 | csasacu(Uhd)GfaAf | A- | 756 | VPusAfsagdTg(Agn)cc | GACAACUUGAACAUG | 1200 |
| 1565620.1 | 2894296.1 | | CfAfuggucacususa | 2894297.1 | | auguUfcAfaguugsusc | GUCACUUA | |
| AD- | A- | 313 | asascuug(Ahd)aCfA | A- | 757 | VPusUfsaadGu(G2p)ac | ACAACUUGAACAUGG | 1201 |
| 1565771.1 | 2894548.1 | | fUfggucacuusasa | 2894549.1 | | caugUfuCfaaguusgsu | UCACUUAU | |
| AD- | A- | 314 | ascsuug(Ahd)AfcAf | A- | 758 | VPusAfsuadAg(Tgn)ga | CAACUUGAACAUGGU | 1202 |
| 1565621.1 | 1577540.1 | | UfGfgucacuuasusa | 2894298.1 | | ccauGfuUfcaagususg | CACUUAUG | |
| AD- | A- | 315 | csusuga(Ahd)CfaUf | A- | 759 | VPusCfsaudAa(G2p)ug | AACUUGAACAUGGUC | 1203 |
| 1565772.1 | 1577508.1 | | GfGfucacuuausgsa | 2894550.1 | | accaUfgUfucaagsusu | ACUUAUGA | |
| AD- | A- | 316 | csusuga(Ahd)CfaUf | A- | 760 | VPusdCsaudAadGugac | AACUUGAACAUGGUC | 1204 |
| 1565836.1 | 1577508.1 | | GfGfucacuuausgsa | 2894300.1 | | dCaUfguucaagsusu | ACUUAUGA | |
| AD- | A- | 317 | csusuga(Ahd)CfaUf | A- | 761 | VPusCfsadTa(Agn)gug | AACUUGAACAUGGUC | 1205 |
| 1565837.1 | 1577508.1 | | GfGfucacuuausgsa | 2894650.1 | | accaUfgUfucaagsusu | ACUUAUGA | |
| AD- | A- | 318 | csusuga(Ahd)CfaUf | A- | 762 | VPusdCsaudAa(G2p)u | AACUUGAACAUGGUC | 1206 |
| 1565838.1 | 1577508.1 | | GfGfucacuuausgsa | 2894651.1 | | gacdCaUfguucaagsusu | ACUUAUGA | |
| AD- | A- | 319 | csusugu(Ahd)CfaUf | A- | 763 | VPusCfsaudAa(G2p)ug | AACUUGAACAUGGUC | 1207 |
| 1565840.1 | 2894654.1 | | GfGfucacuuausgsa | 2894655.1 | | accaUfgUfacaagsusu | ACUUAUGA | |
| AD- | A- | 320 | csusuca(Ahd)CfaUf | A- | 764 | VPusCfsaudAa(G2p)ug | AACUUGAACAUGGUC | 1208 |
| 1565841.1 | 2894656.1 | | GfGfucacuuausgsa | 2894657.1 | | accaUfgUfugaagsusu | ACUUAUGA | |
| AD- | A- | 321 | csusaga(Ahd)CfaUf | A- | 765 | VPusCfsaudAa(G2p)ug | AACUUGAACAUGGUC | 1209 |
| 1565842.1 | 2894658.1 | | GfGfucacuuausgsa | 2894659.1 | | accaUfgUfucuagsusu | ACUUAUGA | |
| AD- | A- | 322 | csusuga(Ahd)CfaUf | A- | 766 | VPusCfsauaAfgUfGfac | AACUUGAACAUGGUC | 1210 |
| 822899.17 | 1577508.1 | | GfGfucacuuausgsa | 1577509.1 | | caUfgUfucaagsusu | ACUUAUGA | |
| AD- | A- | 323 | csusuga(Ahd)CfaUf | A- | 767 | VPusCfsaudAa(G2p)ug | AACUUGAACAUGGUC | 1211 |
| 1565772.2 | 1577508.1 | | GfGfucacuuausgsa | 2894550.1 | | accaUfgUfucaagsusu | ACUUAUGA | |
| AD- | A- | 324 | csusuga(Ahd)caUfG | A- | 768 | VPusdCsaudAadGugac | AACUUGAACAUGGUC | 1212 |
| 1565622.1 | 2894299.1 | | fGfucacuuausgsa | 2894300.1 | | dCaUfguucaagsusu | ACUUAUGA | |
| AD- | A- | 325 | ususgaa(Chd)AfuGf | A- | 769 | VPusUfscadTa(Agn)gu | ACUUGAACAUGGUCA | 1213 |
| 1565843.1 | 1577562.1 | | GfUfcacuuaugsasa | 2894660.1 | | gaccAfuGfuucaasgsu | CUUAUGAC | |
| AD- | A- | 326 | ususgaa(Chd)AfuGf | A- | 770 | VPusUfscadTa(A2p)gu | ACUUGAACAUGGUCA | 1214 |
| 1565844.1 | 1577562.1 | | GfUfcacuuaugsasa | 2894661.1 | | gaccAfuGfuucaasgsu | CUUAUGAC | |
| AD- | A- | 327 | ususgaa(Chd)AfuGf | A- | 771 | VPusdTscadTa(Agn)gu | ACUUGAACAUGGUCA | 1215 |
| 1565845.1 | 1577562.1 | | GfUfcacuuaugsasa | 2894662.1 | | gadCcAfuguucaasgsu | CUUAUGAC | |
| AD- | A- | 328 | ususgaa(Chd)audG | A- | 772 | VPusdTscadTa(Agn)gu | ACUUGAACAUGGUCA | 1216 |
| 1565846.1 | 2894663.1 | | gUfCfacuuaugsasa | 2894662.1 | | gadCcAfuguucaasgsu | CUUAUGAC | |
| AD- | A- | 329 | ususgau(Chd)AfuGf | A- | 773 | VPusUfscadTa(Agn)gu | ACUUGAACAUGGUCA | 1217 |
| 1565848.1 | 2894666.1 | | GfUfcacuuaugsasa | 2894667.1 | | gaccAfuGfaucaasgsu | CUUAUGAC | |
| AD- | A- | 330 | ususgua(Chd)AfuGf | A- | 774 | VPusUfscadTa(Agn)gu | ACUUGAACAUGGUCA | 1218 |
| 1565849.1 | 2894668.1 | | GfUfcacuuaugsasa | 2894669.1 | | gaccAfuGfuacaasgsu | CUUAUGAC | |
| AD- | A- | 331 | ususcaa(Chd)AfuGf | A- | 775 | VPusUfscadTa(Agn)gu | ACUUGAACAUGGUCA | 1219 |
| 1565850.1 | 2894670.1 | | GfUfcacuuaugsasa | 2894671.1 | | gaccAfuGfuugaasgsu | CUUAUGAC | |
| AD- | A- | 332 | ususgaa(Chd)AfuGf | A- | 776 | VPusUfscauAfaGfUfga | ACUUGAACAUGGUCA | 1220 |
| 822926.4 | 1577562.1 | | GfUfcacuuaugsasa | 1577563.1 | | ccAfuGfuucaasgsu | CUUAUGAC | |
| AD- | A- | 333 | ususgaa(Chd)auGfG | A- | 777 | VPusdTscadTadAguga | ACUUGAACAUGGUCA | 1221 |
| 1565623.1 | 2894301.1 | | fUfcacuuaugsasa | 2894302.1 | | dCcAfuguucaasgsu | CUUAUGAC | |
| AD- | A- | 334 | usgsa(Ahd)CfaUfGf | A- | 778 | VPusCfsaudAa(G2p)ug | CUUGAACAUGGUCAC | 1222 |
| 1565839.1 | 2894652.1 | | Gfucacuuausgsa | 2894653.1 | | accaUfgUfucasgsg | UUAUGA | |
| AD- | A- | 335 | usgsaac(Ahd)ugGfU | A- | 779 | VPusdGsucdAudAagu | CUUGAACAUGGUCAC | 1223 |
| 1565624.1 | 2894303.1 | | fCfacuuaugascsa | 2894304.1 | | gdAcCfauguucasasg | UUAUGACA | |
| AD- | A- | 336 | gsasaca(Uhd)GfGfU | A- | 780 | VPusUfscadTa(Agn)gu | UUGAACAUGGUCACU | 1224 |
| 1565847.1 | 2894664.1 | | fcacuuaugsasa | 2894665.1 | | gaccAfuGfuucsgsg | UAUGAC | |
| AD- | A- | 337 | gsasaca(Uhd)GfgUf | A- | 781 | VPusUfsgudCa(Tgn)aa | UUGAACAUGGUCACU | 1225 |
| 1565625.1 | 2894305.1 | | CfAfcuuaugacsasa | 2894306.1 | | gugaCfcAfuguucsasa | UAUGACAU | |
| AD- | A | 338 | asasca(Uhd)gGfuCf | A- | 782 | VPusAfsugdTc(Agn)ua | UGAACAUGGUCACUU | 1226 |
| 1565626.1 | 2894307.1 | | AfCfuuaugacasusa | 2894308.1 | | agugAfcCfauguuscsa | AUGACAUC | |
| AD- | A- | 339 | ascsaugg(Uhd)cAfCf | A- | 783 | VPusGfsaudGu(C2p)a | GAACAUGGUCACUUA | 1227 |
| 1565773.1 | 2894309.1 | | Ufuaugacauscsa | 2894551.1 | | uaaguGfaCfcaugususc | UGACAUCA | |
| AD- | A- | 340 | ascsaugg(Uhd)cAfCf | A- | 784 | VPusGfsadTg(Tgn)cau | GAACAUGGUCACUUA | 1228 |
| 1565627.1 | 2894309.1 | | Ufuaugacauscsa | 2894310.1 | | aaguGfaCfcaugususc | UGACAUCA | |
| AD- | A- | 341 | ascsaugg(Uhd)cAfCf | A- | 785 | VPusGfsaugdTc(Agn)u | GAACAUGGUCACUUA | 1229 |
| 1565628.1 | 2894309.1 | | Ufuaugacauscsa | 2894311.1 | | aaguGfaCfcaugususc | UGACAUCA | |
| AD- | A- | 342 | csasugg(Uhd)CfaCf | A- | 786 | VPusUfsgadTg(Tgn)ca | AACAUGGUCACUUAU | 1230 |
| 1565629.1 | 2894312.1 | | UfUfaugacaucsasa | 2894313.1 | | uaagUfgAfccaugsusu | GACAUCAA | |
| AD- | A- | 343 | asusggu(Chd)AfcUf | A- | 787 | VPusUfsugdAu(G2p)u | ACAUGGUCACUUAUG | 1231 |
| 1565774.1 | 2894552.1 | | UfAfugacaucasasa | 2894553.1 | | cauaaGfuGfaccausgsu | ACAUCAAG | |
| AD- | A- | 344 | usgsguc(Ahd)CfuUf | A- | 788 | VPusCfsuudGa(Tgn)gu | CAUGGUCACUUAUGA | 1232 |
| 1565630.1 | 2894314.1 | | AfUfgacaucaasgsa | 2894315.1 | | cauaAfgUfgaccasusg | CAUCAAGC | |
| AD- | A | 345 | gsgsuca(Chd)UfuAf | A- | 789 | VPusGfscudTg(Agn)ug | AUGGUCACUUAUGAC | 1233 |
| 1565631.1 | 2894316.1 | | UfGfacaucaagscsa | 2894317.1 | | ucauAfaGfugaccsasu | AUCAAGCU | |
| AD- | A- | 346 | gsuscac(Uhd)UfaUf | A- | 790 | VPusAfsgcdTu(G2p)au | UGGUCACUUAUGACA | 1234 |
| 1565775.1 | 2894554.1 | | GfAfcaucaagcsusa | 2894555.1 | | gucaUfaAfgugacscsa | UCAAGCUC | |
| AD- | A- | 347 | gscsaga(Ahd)GfgAf | A- | 791 | VPusCfsccdTg(Agn)gca | UGGCAGAAGGAGAUG | 1235 |
| 1565632.1 | 2894318.1 | | GfAfugcucaggsgsa | 2894319.1 | | ucuCfcUfucugcscsa | CUCAGGGC | |
| AD- | A- | 348 | asasggg(Ahd)GfaGf | A- | 792 | VPusUfsggdCu(G2p)gc | UGAAGGGAGAGCCAG | 1236 |
| 1565776.1 | 2894556.1 | | CfCfagccagccsasa | 2894557.1 | | uggcUfcUfcccuuscsa | CCAGCCAG | |
| AD- | A | 349 | gsasuga(Ahd)CfaUf | A- | 793 | VPusAfsgadTg(G2p)ug | AGGAUGAACAUGGUC | 1237 |
| 1565777.1 | 2894558.1 | | GfGfucaccaucsusa | 2894559.1 | | accaUfgUfucaucscsu | ACCAUCUA | |
| AD- | A- | 350 | gscsauu(Uhd)auGfG | A- | 794 | VPusdAsuudAadAcauc | CAGCAUUUAUGGGAU | 1238 |
| 1565634.1 | 2894322.1 | | fGfauguuuaasusa | 2894323.1 | | dCcAfuaaaugcsusg | GUUUAAUG | |
| AD- | A- | 351 | usgsuuu(Ahd)AfuGf | A- | 795 | VPusUfsugdAa(C2p)ua | GAUGUUUAAUGACA | 1239 |
| 1565778.1 | 2894324.1 | | AfCfauaguucasasa | 2894560.1 | | ugucAfuUfaaacasusc | UAGUUCAAG | |
| AD- | A- | 352 | usgsuuu(Ahd)AfuGf | A- | 796 | VPusUfsudGa(Agn)cua | GAUGUUUAAUGACA | 1240 |
| 1565635.1 | 2894324.1 | | AfCfauaguucasasa | 2894325.1 | | ugucAfuUfaaacasusc | UAGUUCAAG | |
| AD- | A- | 353 | usgsuuu(Ahd)AfuGf | A- | 797 | VPusUfsugadAc(Tgn)a | GAUGUUUAAUGACA | 1241 |
| 1565636.1 | 2894324.1 | | AfCfauaguucasasa | 2894326.1 | | ugucAfuUfaaacasusc | UAGUUCAAG | |
| AD- | A- | 354 | gsusuua(Ahd)UfgAf | A- | 798 | VPusCfsuudGa(Agn)cu | AUGUUUAAUGACAUA | 1242 |
| 1565637.1 | 2894327.1 | | CfAfuaguucaasgsa | 2894328.1 | | auguCfaUfuaaacsasu | GUUCAAGU | |
| AD- | A- | 355 | gsusuua(Ahd)ugAfC | A- | 799 | VPusdCsuudGadAcua | AUGUUUAAUGACAUA | 1243 |
| 1565638.1 | 2894329.1 | | fAfuaguucaasgsa | 2894330.1 | | udGuCfauuaaacsasu | GUUCAAGU | |
| AD- | A- | 356 | ususuaa(Uhd)GfaCf | A- | 800 | VPusAfscudTg(Agn)ac | UGUUUAAUGACAUA | 1244 |
| 1565639.1 | 2894331.1 | | AfUfaguucaagsusa | 2894332.1 | | uaugUfcAfuuaaascsa | GUUCAAGUU | |
| AD- | A- | 357 | ususaaug(Ahd)cAfU | A- | 801 | VPusAfsacdTu(G2p)aa | GUUUAAUGACAUAG | 1245 |
| 1565779.1 | 2894561.1 | | fAfguucaagususa | 2894562.1 | | cuauGfuCfauuaasasc | UUCAAGUUU | |
| AD- | A- | 358 | usasaug(Ahd)CfaUf | A- | 802 | VPusAfsaadCu(Tgn)ga | UUUAAUGACAUAGU | 1246 |
| 1565640.1 | 2894333.1 | | AfGfuucaaguususa | 2894334.1 | | acuaUfgUfcauuasasa | UCAAGUUUU | |
| AD- | A- | 359 | usasaug(Ahd)caUfA | A- | 803 | VPusdAsaadCudTgaac | UUUAAUGACAUAGU | 1247 |
| 1565641.1 | 2894335.1 | | fGfuucaaguususa | 2894336.1 | | dTaUfgucauuasasa | UCAAGUUUU | |
| AD- | A- | 360 | asasuga(Chd)AfuAf | A | 804 | VPusAfsaadAc(Tgn)ug | UUAAUGACAUAGUUC | 1248 |
| 1565642.1 | 2894337.1 | | GfUfucaaguuususa | 2894338.1 | | aacuAfuGfucauusasa | AAGUUUUC | |
| AD- | A- | 361 | asasuga(Chd)auAfG | A- | 805 | VPusdAsaadAcdTugaa | UUAAUGACAUAGUUC | 1249 |
| 1565643.1 | 2894339.1 | | fUfucaaguuususa | 2894340.1 | | dCuAfugucauusasa | AAGUUUUC | |
| AD- | A- | 362 | asusgac(Ahd)uaGfU | A- | 806 | VPusdGsaadAadCuuga | UAAUGACAUAGUUCA | 1250 |
| 1565644.1 | 2894341.1 | | fUfcaaguuuuscsa | 2894342.1 | | dAcUfaugucaususa | AGUUUUCU | |
| AD- | A- | 363 | usgsaca(Uhd)agUfU | A- | 807 | VPusdAsgadAadAcuug | AAUGACAUAGUUCAA | 1251 |
| 1565645.1 | 2894343.1 | | fCfaaguuuucsusa | 2894344.1 | | dAaCfuaugucasusu | GUUUUCUU | |
| AD- | A- | 364 | gsascau(Ahd)guUfC | A- | 808 | VPusdAsagdAadAacuu | AUGACAUAGUUCAAG | 1252 |
| 1565646.1 | 2894345.1 | | fAfaguuuucususa | 2894346.1 | | dGaAfcuaugucsasu | UUUUCUUG | |
| AD | A- | 365 | ascsaua(Ghd)UfuCf | A- | 809 | VPusCfsaaga(Agn)aac | UGACAUAGUUCAAGU | 1253 |
| 1565851.1 | 2894672.1 | | AfAfguuuucuusgsa | 1806645.1 | | uugAfaCfuauguscsa | UUUCUUGU | |
| AD- | A- | 366 | ascsauag(Uhd)uCfA | A- | 810 | VPusdCsaadGadAaacu | UGACAUAGUUCAAGU | 1254 |
| 1565852.1 | 2894347.1 | | fAfguuuucuusgsa | 2894673.1 | | dTgAfacuauguscsg | UUUCUUGU | |
| AD- | A- | 367 | ascsauag(Uhd)uCfA | A- | 811 | VPusCfsaadGa(Agn)aa | UGACAUAGUUCAAGU | 1255 |
| 1565853.1 | 2894347.1 | | fAfguuuucuusgsa | 2894674.1 | | cuugAfaCfuauguscsg | UUUCUUGU | |
| AD- | A- | 368 | ascsauag(Uhd)uCfA | A- | 812 | VPusdCsaadGa(Agn)a | UGACAUAGUUCAAGU | 1256 |
| 1565854.1 | 2894347.1 | | fAfguuuucuusgsa | 2894675.1 | | acudTgAfaCfuauguscs | UUUCUUGU | |
| AD- | A- | 369 | ascsauug(Uhd)uCfA | A- | 813 | VPusCfsaadGa(Agn)aa | UGACAUAGUUCAAGU | 1257 |
| 1565857.1 | 2894679.1 | | fAfguuuucuusgsa | 2894680.1 | | cuugAfaCfaauguscsg | UUUCUUGU | |
| AD- | A- | 370 | ascsaaag(Uhd)uCfA | A- | 814 | VPusCfsaadGa(Agn)aa | UGACAUAGUUCAAGU | 1258 |
| 1565858.1 | 2894681.1 | | fAfguuuucuusgsa | 2894682.1 | | cuugAfaCfuuuguscsg | UUUCUUGU | |
| AD- | A- | 371 | ascsuuag(Uhd)uCfA | A- | 815 | VPusCfsaadGa(Agn)aa | UGACAUAGUUCAAGU | 1259 |
| 1565859.1 | 2894683.1 | | fAfguuuucuusgsa | 2894684.1 | | cuugAfaCfuaaguscsg | UUUCUUGU | |
| AD- | A- | 372 | ascsauag(Uhd)uCfA | A- | 816 | VPusdCsaadGadAaacu | UGACAUAGUUCAAGU | 1260 |
| 1565647.1 | 2894347.1 | | fAfguuuucuusgsa | 2894348.1 | | dTgAfacuauguscsa | UUUCUUGU | |
| AD- | A- | 373 | csasuag(Uhd)ucAfA | A- | 817 | VPusdAscadAgdAaaac | GACAUAGUUCAAGUU | 1261 |
| 1565648.1 | 2894349.1 | | fGfuuuucuugsusa | 2894350.1 | | dTuGfaacuaugsusc | UUCUUGUG | |
| AD- | A- | 374 | asusagu(Uhd)CfAfA | A- | 818 | VPusCfsaadGa(Agn)aa | ACAUAGUUCAAGUUU | 1262 |
| 1565855.1 | 2894676.1 | | fguuuucuusgsa | 2894677.1 | | cuugAfaCfuausgsu | UCUUGU | |
| AD- | A- | 375 | asusagu(Uhd)CfAfA | A- | 819 | VPusdCsaadGa(Agn)a | ACAUAGUUCAAGUUU | 1263 |
| 1565856.1 | 2894676.1 | | fguuuucuusgsa | 2894678.1 | | acudTgAfaCfuausgsu | UCUUGU | |
| AD- | A- | 376 | asusagu(Uhd)caAfG | A- | 820 | VPusdCsacdAadGaaaa | ACAUAGUUCAAGUUU | 1264 |
| 1565649.1 | 2894351.1 | | fUfuuucuugusgsa | 2894352.1 | | dCuUfgaacuausgsu | UCUUGUGA | |
| AD- | A- | 377 | usasguu(Chd)AfaGf | A- | 821 | VPusUfscadCa(Agn)ga | CAUAGUUCAAGUUUU | 1265 |
| 1565650.1 | 2894353.1 | | UfUfuucuugugsasa | 2894354.1 | | aaacUfuGfaacuasusg | CUUGUGAU | |
| AD- | A- | 378 | usasguu(Chd)aaGfU | A- | 822 | VPusdTscadCadAgaaa | CAUAGUUCAAGUUUU | 1266 |
| 1565651.1 | 2894355.1 | | fUfuucuugugsasa | 2894356.1 | | dAcUfugaacuasusg | CUUGUGAU | |
| AD- | A- | 379 | asgsuuc(Ahd)AfgUf | A- | 823 | VPusAfsucdAc(Agn)ag | AUAGUUCAAGUUUUC | 1267 |
| 1565652.1 | 2894357.1 | | UfUfucuugugasusa | 2894358.1 | | aaaaCfuUfgaacusasu | UUGUGAUU | |
| AD- | A- | 380 | asgsuuc(Ahd)agUfU | A- | 824 | VPusdAsucdAcdAagaa | AUAGUUCAAGUUUUC | 1268 |
| 1565653.1 | 2894359.1 | | fUfucuugugasusa | 2894360.1 | | dAaCfuugaacusasu | UUGUGAUU | |
| AD- | A- | 381 | gsusuca(Ahd)GfuUf | A- | 825 | VPusAfsaudCa(C2p)aa | UAGUUCAAGUUUUC | 1269 |
| 1565780.1 | 2894361.1 | | UfUfcuugugaususa | 2894563.1 | | gaaaAfcUfugaacsusa | UUGUGAUUU | |
| AD- | A- | 382 | gsusuca(Ahd)GfuUf | A- | 826 | VPusAfsadTc(Agn)caa | UAGUUCAAGUUUUC | 1270 |
| 1565654.1 | 2894361.1 | | UfUfcuugugaususa | 2894362.1 | | gaaaAfcUfugaacsusa | UUGUGAUUU | |
| AD- | A- | 383 | ususcaag(Uhd)uUf | A- | 827 | VPusAfsaadTc(Agn)ca | AGUUCAAGUUUUCU | 1271 |
| 1565655.1 | 2894363.1 | | UfCfuugugauususa | 2894364.1 | | agaaAfaCfuugaascsu | UGUGAUUUG | |
| AD- | A- | 384 | uscsaag(Uhd)UfuUf | A- | 828 | VPusCfsaadAu(C2p)ac | GUUCAAGUUUUCUU | 1272 |
| 1565781.1 | 2894365.1 | | CfUfugugauuusgsa | 2894564.1 | | aagaAfaAfcuugasasc | GUGAUUUGG | |
| AD- | A- | 385 | uscsaag(Uhd)UfuUf | A- | 829 | VPusCfsadAa(Tgn)cac | GUUCAAGUUUUCUU | 1273 |
| 1565656.1 | 2894365.1 | | CfUfugugauuusgsa | 2894366.1 | | aagaAfaAfcuugasasc | GUGAUUUGG | |
| AD- | A- | 386 | uscsaag(Uhd)UfuUf | A- | 830 | VPusCfsaaadTc(Agn)c | GUUCAAGUUUUCUU | 1274 |
| 1565657.1 | 2894365.1 | | CfUfugugauuusgsa | 2894367.1 | | aagaAfaAfcuugasasc | GUGAUUUGG | |
| AD- | A- | 387 | uscsaag(Uhd)uuUfC | A- | 831 | VPusdCsaadAudCacaa | GUUCAAGUUUUCUU | 1275 |
| 1565658.1 | 2894368.1 | | fUfugugauuusgsa | 2894369.1 | | dGaAfaacuugasasc | GUGAUUUGG | |
| AD- | A- | 388 | csasagu(Uhd)uuCfU | A- | 832 | VPusdCscadAadTcaca | UUCAAGUUUUCUUG | 1276 |
| 1565659.1 | 2894370.1 | | fUfgugauuugsgsa | 2894371.1 | | dAgAfaaacuugsasa | UGAUUUGGG | |
| AD- | A- | 389 | asasguu(Uhd)ucUf | A- | 833 | VPusdCsccdAadAucac | UCAAGUUUUCUUGU | 1277 |
| 1565660.1 | 2894372.1 | | UfGfugauuuggsgsa | 2894373.1 | | dAaGfaaaacuusgsa | GAUUUGGGG | |
| AD- | A- | 390 | usgsaaa(Ahd)CfcAf | A- | 834 | VPusUfsgcdAa(G2p)ag | CCUGAAAACCAUUGC | 1278 |
| 1565782.1 | 2894565.1 | | UfUfgcucuugcsasa | 2894566.1 | | caauGfgUfuuucasgsg | UCUUGCAU | |
| AD- | A- | 391 | gsasaaa(Chd)CfaUf | A- | 835 | VPusAfsugdCa(Agn)ga | CUGAAAACCAUUGCU | 1279 |
| 1565661.1 | 2894374.1 | | UfGfcucuugcasusa | 2894375.1 | | gcaaUfgGfuuuucsasg | CUUGCAUG | |
| AD- | A- | 392 | gsasaaa(Chd)caUfU | A- | 836 | VPusdAsugdCadAgagc | CUGAAAACCAUUGCU | 1280 |
| 1565662.1 | 2894376.1 | | fGfcucuugcasusa | 2894377.1 | | dAaUfgguuuucsasg | CUUGCAUG | |
| AD- | A- | 393 | asasaac(Chd)AfuUf | A- | 837 | VPusCfsaudGc(Agn)ag | UGAAAACCAUUGCUC | 1281 |
| 1565663.1 | 2894378.1 | | GfCfucuugcausgsa | 2894379.1 | | agcaAfuGfguuuuscsa | UUGCAUGU | |
| AD- | A- | 394 | asasaac(Chd)auUfG | A- | 838 | VPusdCsaudGcdAagag | UGAAAACCAUUGCUC | 1282 |
| 1565664.3 | 2894380.1 | | fCfucuugcausgsa | 2894381.1 | | dCaAfugguuuuscsa | UUGCAUGU | |
| AD- | A- | 395 | asasacc(Ahd)UfuGf | A- | 839 | VPusAfscadTg(C2p)aa | GAAAACCAUUGCUCU | 1283 |
| 1565783.1 | 2894382.1 | | CfUfcuugcaugsusa | 2894567.1 | | gagcAfaUfgguuususc | UGCAUGUU | |
| AD- | A- | 396 | asasacc(Ahd)UfuGf | A- | 840 | VPusAfscaudGc(Agn)a | GAAAACCAUUGCUCU | 1284 |
| 1565665.1 | 2894382.1 | | CfUfcuugcaugsusa | 2894383.1 | | gagcAfaUfgguuususc | UGCAUGUU | |
| AD- | A- | 397 | asascca(Uhd)UfgCf | A- | 841 | VPusAfsacdAu(G2p)ca | AAAACCAUUGCUCUU | 1285 |
| 1565784.1 | 2894568.1 | | UfCfuugcaugususa | 2894569.1 | | agagCfaAfugguususu | GCAUGUUA | |
| AD- | A- | 398 | ascscau(Uhd)GfcUf | A- | 842 | VPusUfsaadCa(Tgn)gc | AAACCAUUGCUCUUG | 1286 |
| 1565666.1 | 2894384.1 | | CfUfugcauguusasa | 2894385.1 | | aagaGfcAfauggususu | CAUGUUAC | |
| AD- | A- | 399 | cscsauug(Chd)uCfU | A- | 843 | VPusGfsuadAc(Agn)ug | AACCAUUGCUCUUGC | 1287 |
| 1565667.1 | 2894386.1 | | fUfgcauguuascsa | 2894387.1 | | caagAfgCfaauggsusu | AUGUUACA | |
| AD- | A- | 400 | csasuug(Chd)UfcUf | A- | 844 | VPusUfsgudAa(C2p)au | ACCAUUGCUCUUGCA | 1288 |
| 1565785.1 | 2894388.1 | | UfGfcauguuacsasa | 2894570.1 | | gcaaGfaGfcaaugsgsu | UGUUACAU | |
| AD- | A- | 401 | csasuug(Chd)UfcUf | A- | 845 | VPusUfsgdTa(Agn)cau | ACCAUUGCUCUUGCA | 1289 |
| 1565668.1 | 2894388.1 | | UfGfcauguuacsasa | 2894389.1 | | gcaaGfaGfcaaugsgsu | UGUUACAU | |
| AD- | A- | 402 | asusugc(Uhd)cuUfG | A- | 846 | VPusdAsugdTadAcaug | CCAUUGCUCUUGCAU | 1290 |
| 1565669.1 | 2894390.1 | | fCfauguuacasusa | 2894391.1 | | dCaAfgagcaausgsg | GUUACAUG | |
| AD- | A- | 403 | ususgcu(Chd)uuGfC | A- | 847 | VPusdCsaudGudAacau | CAUUGCUCUUGCAUG | 1291 |
| 1565670.1 | 2894392.1 | | fAfuguuacausgsa | 2894393.1 | | dGcAfagagcaasusg | UUACAUGG | |
| AD- | A- | 404 | ususgcu(Chd)UfuGf | A- | 848 | VPusCfsaugUfaAfCfau | CAUUGCUCUUGCAUG | 1292 |
| 1565860.1 | 2894685.1 | | CfAfuguuacausgsa | 1804746.1 | | gcAfaGfagcaasusg | UUACAUGG | |
| AD- | A- | 405 | ususgca(Chd)uuGfC | A- | 849 | VPusdCsaudGudAacau | CAUUGCUCUUGCAUG | 1293 |
| 1565861.1 | 2894686.1 | | fAfuguuacausgsa | 2894687.1 | | dGcAfagugcaasusg | UUACAUGG | |
| AD- | A- | 406 | ususggu(Chd)uuGfC | A- | 850 | VPusdCsaudGudAacau | CAUUGCUCUUGCAUG | 1294 |
| 1565862.1 | 2894688.1 | | fAfuguuacausgsa | 2894689.1 | | dGcAfagaccaasusg | UUACAUGG | |
| AD- | A- | 407 | ususccu(Chd)uuGfC | A- | 851 | VPusdCsaudGudAacau | CAUUGCUCUUGCAUG | 1295 |
| 1565863.1 | 2894690.1 | | fAfuguuacausgsa | 2894691.1 | | dGcAfagaggaasusg | UUACAUGG | |
| AD- | A- | 408 | ususgcu(Chd)UfudG | A- | 852 | VPusdCsaudGudAacau | CAUUGCUCUUGCAUG | 1296 |
| 1565864.1 | 2894692.1 | | cdAUfguuacausgsa | 2894393.1 | | dGcAfagagcaasusg | UUACAUGG | |
| AD- | A- | 409 | ususgcu(Chd)UfuGf | A- | 853 | VPusCfsaudGu(Agn)ac | CAUUGCUCUUGCAUG | 1297 |
| 1565866.1 | 2894685.1 | | CfAfuguuacausgsa | 2894695.1 | | augcAfaGfagcaasusg | UUACAUGG | |
| AD- | A- | 410 | ususgcu(Chd)uuGfC | A- | 854 | VPusdCsaudGudAacau | CAUUGCUCUUGCAUG | 1298 |
| 1565670.2 | 2894392.1 | | fAfuguuacausgsa | 2894393.1 | | dGcAfagagcaasusg | UUACAUGG | |
| AD- | A- | 411 | usgscuc(Uhd)UfgCf | A- | 855 | VPusCfscadTg(Tgn)aac | AUUGCUCUUGCAUGU | 1299 |
| 1565671.1 | 2894394.1 | | AfUfguuacaugsgsa | 2894395.1 | | augCfaAfgagcasasu | UACAUGGU | |
| AD- | A- | 412 | gscsucu(Uhd)GfCfA | A- | 856 | VPusdCsaudGudAacau | UUGCUCUUGCAUGU | 1300 |
| 1565865.1 | 2894693.1 | | fuguuacausgsa | 2894694.1 | | dGcAfagagcsgsg | UACAUGG | |
| AD- | A- | 413 | gscsucu(Uhd)GfcAf | A- | 857 | VPusAfsccdAu(G2p)ua | UUGCUCUUGCAUGU | 1301 |
| 1565786.1 | 2894571.1 | | UfGfuuacauggsusa | 2894572.1 | | acauGfcAfagagcsasa | UACAUGGUU | |
| AD- | A- | 414 | csuscuug(Chd)aUfG | A- | 858 | VPusAfsacdCa(Tgn)gu | UGCUCUUGCAUGUUA | 1302 |
| 1565672.1 | 2894396.1 | | fUfuacauggususa | 2894397.1 | | aacaUfgCfaagagscsa | CAUGGUUA | |
| AD- | A- | 415 | csuscuug(Chd)aUfG | A- | 859 | VPusdAsacdCadTguaa | UGCUCUUGCAUGUUA | 1303 |
| 1565673.1 | 2894396.1 | | fUfuacauggususa | 2894398.1 | | dCaUfgcaagagscsa | CAUGGUUA | |
| AD- | A- | 416 | uscsuug(Chd)AfuGf | A- | 860 | VPusUfsaadCc(Agn)ug | GCUCUUGCAUGUUAC | 1304 |
| 1565674.1 | 2894399.1 | | UfUfacaugguusasa | 2894400.1 | | uaacAfuGfcaagasgsc | AUGGUUAC | |
| AD- | A- | 417 | csusugc(Ahd)UfgUf | A- | 861 | VPusGfsuadAc(C2p)au | CUCUUGCAUGUUACA | 1305 |
| 1565787.1 | 1577564.1 | | UfAfcaugguuascsa | 2894573.1 | | guaaCfaUfgcaagsasg | UGGUUACC | |
| AD- | A- | 418 | csusugc(Ahd)UfgUf | A- | 862 | VPusGfsuaadCc(Agn)u | CUCUUGCAUGUUACA | 1306 |
| 1565675.1 | 1577564.1 | | UfAfcaugguuascsa | 2894401.1 | | guaaCfaUfgcaagsasg | UGGUUACC | |
| AD- | A- | 419 | ususgca(Uhd)GfuUf | A- | 863 | VPusGfsgudAa(C2p)ca | UCUUGCAUGUUACAU | 1307 |
| 1565788.1 | 1577566.1 | | AfCfaugguuacscsa | 2894574.1 | | uguaAfcAfugcaasgsa | GGUUACCA | |
| AD- | A- | 420 | ususgca(Uhd)GfuUf | A- | 864 | VPusGfsgdTa(Agn)cca | UCUUGCAUGUUACAU | 1308 |
| 1565676.1 | 1577566.1 | | AfCfaugguuacscsa | 2894402.1 | | uguaAfcAfugcaasgsa | GGUUACCA | |
| AD- | A- | 421 | ususgca(Uhd)guUfA | A- | 865 | VPusdGsgudAadCcaug | UCUUGCAUGUUACAU | 1309 |
| 1565677.1 | 2894403.1 | | fCfaugguuacscsa | 2894404.1 | | dTaAfcaugcaasgsa | GGUUACCA | |
| AD- | A- | 422 | usgscaug(Uhd)uAfC | A- | 866 | VPusUfsggdTa(Agn)cc | CUUGCAUGUUACAUG | 1310 |
| 1565678.1 | 2894405.1 | | fAfugguuaccsasa | 2894406.1 | | auguAfaCfaugcasasg | GUUACCAC | |
| AD- | A- | 423 | gscsaug(Uhd)UfaCf | A- | 867 | VPusGfsugdGu(Agn)ac | UUGCAUGUUACAUG | 1311 |
| 1565679.1 | 1577580.1 | | AfUfgguuaccascsa | 2894407.1 | | caugUfaAfcaugcsasa | GUUACCACA | |
| AD- | A- | 424 | gscsaug(Uhd)uaCfA | A- | 868 | VPusdGsugdGudAacca | UUGCAUGUUACAUG | 1312 |
| 1565680.1 | 2894408.1 | | fUfgguuaccascsa | 2894409.1 | | dTgUfaacaugcsasa | GUUACCACA | |
| AD- | A- | 425 | csasugu(Uhd)AfcAf | A- | 869 | VPusUfsgudGg(Tgn)aa | UGCAUGUUACAUGG | 1313 |
| 1565681.1 | 2894410.1 | | UfGfguuaccacsasa | 2894411.1 | | ccauGfuAfacaugscsa | UUACCACAA | |
| AD- | A- | 426 | asusguu(Ahd)CfaUf | A- | 870 | VPusUfsugdTg(G2p)ua | GCAUGUUACAUGGU | 1314 |
| 1565789.1 | 2894575.1 | | GfGfuuaccacasasa | 2894576.1 | | accaUfgUfaacausgsc | UACCACAAG | |
| AD- | A- | 427 | usgsuua(Chd)AfuGf | A- | 871 | VPusCfsuudGu(G2p)g | CAUGUUACAUGGUUA | 1315 |
| 1565790.1 | 2894577.1 | | GfUfuaccacaasgsa | 2894578.1 | | uaaccAfuGfuaacasusg | CCACAAGC | |
| AD- | A- | 428 | csusccu(Chd)ugGfCf | A- | 872 | VPusdTsucdGadTgcug | AGCUCCUCUGGCCAG | 1316 |
| 1565682.1 | 2894412.1 | | Cfagcaucgasasa | 2894413.1 | | dGcCfagaggagscsu | CAUCGAAU | |
| AD- | A- | 429 | asusaua(Ahd)GfuAf | A- | 873 | VPusUfsaadAu(G2p)ca | GAAUAUAAGUAAGAU | 1317 |
| 1565791.1 | 2894579.1 | | AfGfaugcauuusasa | 2894580.1 | | ucuuAfcUfuauaususc | GCAUUUAC | |
| AD- | A- | 430 | usasuaag(Uhd)aAfG | A- | 874 | VPusdGsuadAadTgcau | AAUAUAAGUAAGAUG | 1318 |
| 1565683.1 | 2894414.1 | | fAfugcauuuascsa | 2894415.1 | | dCuUfacuuauasusu | CAUUUACU | |
| AD- | A- | 431 | asusaag(Uhd)aaGfA | A- | 875 | VPusdAsgudAadAugca | AUAUAAGUAAGAUGC | 1319 |
| 1565684.1 | 2894416.1 | | fUfgcauuuacsusa | 2894417.1 | | dTcUfuacuuausasu | AUUUACUA | |
| AD- | A- | 432 | usasagu(Ahd)agAfU | A- | 876 | VPusdTsagdTadAaugc | UAUAAGUAAGAUGCA | 1320 |
| 1565685.1 | 2894418.1 | | fGfcauuuacusasa | 2894419.1 | | dAuCfuuacuuasusa | UUUACUAC | |
| AD- | A- | 433 | asasgua(Ahd)GfaUf | A- | 877 | VPusGfsuagUfaAfAfug | AUAAGUAAGAUGCAU | 1321 |
| 1565867.1 | 2894420.1 | | GfCfauuuacuascsa | 1804926.1 | | caUfcUfuacuusasu | UUACUACA | |
| AD- | A- | 434 | asasgua(Ahd)GfaUf | A- | 878 | VPusdGsuadGudAaau | AUAAGUAAGAUGCAU | 1322 |
| 1565868.1 | 2894420.1 | | GfCfauuuacuascsa | 2894696.1 | | gdCaUfcuuacuusgsu | UUACUACA | |
| AD- | A- | 435 | asasgua(Ahd)GfaUf | A- | 879 | VPusGfsuadGu(Agn)aa | AUAAGUAAGAUGCAU | 1323 |
| 1565869.1 | 2894420.1 | | GfCfauuuacuascsa | 2894697.1 | | ugcaUfcUfuacuusgsu | UUACUACA | |
| AD- | A- | 436 | asasgua(Ahd)GfaUf | A- | 880 | VPusGfsuadGu(A2p)a | AUAAGUAAGAUGCAU | 1324 |
| 1565870.1 | 2894420.1 | | GfCfauuuacuascsa | 2894698.1 | | augcaUfcUfuacuusgsu | UUACUACA | |
| AD- | A- | 437 | asasgua(Ahd)gaUfG | A- | 881 | VPusGfsuadGu(Agn)aa | AUAAGUAAGAUGCAU | 1325 |
| 1565871.1 | 2894422.1 | | fCfauuuacuascsa | 2894697.1 | | ugcaUfcUfuacuusgsu | UUACUACA | |
| AD- | A- | 438 | asasgua(Ahd)gadTg | A- | 882 | VPusdGsuadGu(Agn)a | AUAAGUAAGAUGCAU | 1326 |
| 1565872.1 | 2894699.1 | | CfdAuuuacuascsa | 2894700.1 | | augdCaUfcUfuacuusgs | UUACUACA | |
| AD- | A- | 439 | asasgua(Ahd)gaUfG | A- | 883 | VPusdGsuadGu(Agn)a | AUAAGUAAGAUGCAU | 1327 |
| 1565873.1 | 2894422.1 | | fCfauuuacuascsa | 2894700.1 | | augdCaUfcUfuacuusgs | UUACUACA | |
| AD- | A- | 440 | asasguu(Ahd)gaUfG | A- | 884 | VPusGfsuadGu(Agn)aa | AUAAGUAAGAUGCAU | 1328 |
| 1565874.1 | 2894701.1 | | fCfauuuacuascsa | 2894702.1 | | ugcaUfcUfaacuusgsu | UUACUACA | |
| AD- | A- | 441 | asasgaa(Ahd)gaUfG | A- | 885 | VPusGfsuadGu(Agn)aa | AUAAGUAAGAUGCAU | 1329 |
| 1565875.1 | 2894703.1 | | fCfauuuacuascsa | 2894704.1 | | ugcaUfcUfuucuusgsu | UUACUACA | |
| AD- | A- | 442 | asascua(Ahd)gaUfG | A- | 886 | VPusGfsuadGu(Agn)aa | AUAAGUAAGAUGCAU | 1330 |
| 1565876.1 | 2894705.1 | | fCfauuuacuascsa | 2894706.1 | | ugcaUfcUfuaguusgsu | UUACUACA | |
| AD- | A- | 443 | asasgua(Ahd)GfaUf | A- | 887 | VPusGfsuadGu(Agn)aa | AUAAGUAAGAUGCAU | 1331 |
| 1565686.1 | 2894420.1 | | GfCfauuuacuascsa | 2894421.1 | | ugcaUfcUfuacuusasu | UUACUACA | |
| AD- | A- | 444 | asasgua(Ahd)gaUfG | A- | 888 | VPusdGsuadGudAaau | AUAAGUAAGAUGCAU | 1332 |
| 1565687.1 | 2894422.1 | | fCfauuuacuascsa | 2894423.1 | | gdCaUfcuuacuusasu | UUACUACA | |
| AD- | A- | 445 | asgsuaag(Ahd)uGfC | A- | 889 | VPusUfsgudAg(Tgn)aa | UAAGUAAGAUGCAUU | 1333 |
| 1565688.1 | 2894424.1 | | fAfuuuacuacsasa | 2894425.1 | | augcAfuCfuuacususa | UACUACAG | |
| AD- | A- | 446 | gsusaag(Ahd)UfGfC | A- | 890 | VPusGfsuadGu(Agn)aa | AAGUAAGAUGCAUUU | 1334 |
| 1565877.1 | 2894707.1 | | fauuuacuascsa | 2894708.1 | | ugcaUfcUfuacsusu | ACUACA | |
| AD- | A- | 447 | ususggc(Uhd)UfcUf | A- | 891 | VPusUfscudGa(Agn)gc | AGUUGGCUUCUAAU | 1335 |
| 1565689.1 | 2894426.1 | | AfAfugcuucagsasa | 2894427.1 | | auuaGfaAfgccaascsu | GCUUCAGAU | |
| AD- | A- | 448 | csusucu(Ahd)AfuGf | A | 892 | VPusUfscudAu(C2p)ug | GGCUUCUAAUGCUUC | 1336 |
| 1565792.1 | 2894428.1 | | CfUfucagauagsasa | 2894581.1 | | aagcAfuUfagaagscsc | AGAUAGAA | |
| AD- | A- | 449 | csusucu(Ahd)AfuGf | A- | 893 | VPusUfscdTa(Tgn)cug | GGCUUCUAAUGCUUC | 1337 |
| 1565690.1 | 2894428.1 | | CfUfucagauagsasa | 2894429.1 | | aagcAfuUfagaagscsc | AGAUAGAA | |
| AD- | A- | 450 | csusucu(Ahd)AfuGf | A- | 894 | VPusUfscuadTc(Tgn)g | GGCUUCUAAUGCUUC | 1338 |
| 1565691.1 | 2894428.1 | | CfUfucagauagsasa | 2894430.1 | | aagcAfuUfagaagscsc | AGAUAGAA | |

TABLE 2B
Exemplary Human MYOC siRNA Unmodified Single Strands and Duplex Sequences
Column 1 indicates duplex name; the number following the decimal point in a duplex name merely
refers to a batch production number. Column 2 indicates the sense sequence name. Column 3
indicates the sequence ID for the sequence of column 4. Column 4 provides the unmodified
sequence of a sense strand suitable for use in a duplex described herein. Column 5 provides
the position in the target mRNA (NM_000261.2) of the sense strand of Column 4. Column 6
indicates the antisense sequence name. Column 7 indicates the sequence ID for the sequence of
column 8. Column 8 provides the sequence of an antisense strand suitable for use in a duplex
described herein, without specifying chemical modifications. Column 9 indicates the position
in the target mRNA (NM_000261.2) that is complementary to the antisense strand of Column 8.

| | | | | mRNA | | | | mRNA |
|---|---|---|---|---|---|---|---|---|
| | | | | target | | Seq | | target |
| | | Seq | | range | | ID | | range |
| | Sense | ID | | in | Antisense | NO: | antisense | in |
| Duplex | sequence | NO: | Sense sequence | NM_000 | sequence | (anti- | sequence | NM_000 |
| Name | name | (sense) | (5'-3') | 261.2 | name | sense) | (5'-3') | 261.2 |
| AD- | A- | 1339 | CUCUCAGCACAGCAG | 29-49 | Å- | 1783 | UAAGCTCUGCUGUG | 27-49 |
| 1565444.1 | 2893965.1 | | AGCUUA | | 2893966.1 | | CUGAGAGGU | |
| AD- | A- | 1340 | CUCUCAGCACAGCAG | 29-49 | A- | 1784 | UAAGCTCTGCUGUG | 27-49 |
| 1565445.1 | 2893965.1 | | AGCUUA | | 2893967.1 | | CUGAGAGGU | |
| AD- | A- | 1341 | CUCUCAGCACAGCAG | 29-49 | A- | 1785 | UAAGCUCUGCUGU | 27-49 |
| 1565692.1 | 2893965.1 | | AGCUUA | | 2894431.1 | | GCUGAGAGGU | |
| AD- | A- | 1342 | UCUCAGCACAGCAGA | 30-50 | A- | 1786 | UAAAGCTCUGCUGU | 28-50 |
| 1565446.1 | 2893968.1 | | GCUUUA | | 2893969.1 | | GCUGAGAGG | |
| AD- | A- | 1343 | CAGCAGAGCUUUCCA | 38-58 | Å- | 1787 | UUCCTCTGGAAAGC | 36-58 |
| 1565447.1 | 2893970.1 | | GAGGAA | | 2893971.1 | | UCUGCUGUG | |
| AD- | A- | 1344 | AAUGAGGUUCUUCU | 77-97 | A- | 1788 | UGUGCACAGAAGAA | 75-97 |
| 1565448.1 | 2893972.1 | | GUGCACA | | 2893973.1 | | CCUCAUUGC | |
| AD- | A- | 1345 | AAUGAGGUUCUUCU | 77-97 | A- | 1789 | UGUGCACAGAAGAA | 75-97 |
| 1565693.1 | 2893972.1 | | GUGCACA | | 2894432.1 | | CCUCAUUGC | |
| AD- | A- | 1346 | AUGAGGUUCUUCUG | 78-98 | A- | 1790 | UCGUGCACAGAAGA | 76-98 |
| 1565449.1 | 2893974.1 | | UGCACGA | | 2893975.1 | | ACCUCAUUG | |
| AD- | A- | 1347 | UGAGGUUCUUCUGU | 79-99 | A- | 1791 | UACGUGCACAGAAG | 77-99 |
| 1565450.1 | 2893976.1 | | GCACGUA | | 2893977.1 | | AACCUCAUU | |
| AD- | A- | 1348 | UGAGGUUCUUCUGU | 79-99 | A- | 1792 | UACGTGCACAGAAG | 77-99 |
| 1565694.1 | 2893976.1 | | GCACGUA | | 2894433.1 | | AACCUCAUU | |
| AD- | A- | 1349 | GAGGUUCUUCUGUG | 80-100 | A- | 1793 | UAACGUGCACAGAA | 78-100 |
| 1565695.1 | 2894434.1 | | CACGUUA | | 2894435.1 | | GAACCUCAU | |
| AD- | A- | 1350 | AGGUUCUUCUGUGC | 81-101 | A- | 1794 | UCAACGUGCACAGA | 79-101 |
| 1193175.5 | 2058874.1 | | ACGUUGA | | 1801665.1 | | AGAACCUCA | |
| AD- | A- | 1351 | AGGUUCUUCUGUGC | 81-101 | A- | 1795 | UCAACGTGCACAGA | 79-101 |
| 1565793.1 | 2893978.1 | | ACGUUGA | | 2894582.1 | | AGAACCUCG | |
| AD- | A- | 1352 | AGGUUCUUCUGUGC | 81-101 | A- | 1796 | UCAACGTGCACAGA | 79-101 |
| 1565795.1 | 2058874.1 | | ACGUUGA | | 2894585.1 | | AGAACCUCG | |
| AD- | A- | 1353 | AGGUUCUUCUGUGC | 81-101 | A- | 1797 | UCAACGTGCACAGA | 79-101 |
| 1565796.1 | 2058874.1 | | ACGUUGA | | 2894586.1 | | AGAACCUCG | |
| AD- | A- | 1354 | AGGUACUUCUGUGC | 81-101 | A- | 1798 | UCAACGTGCACAGA | 79-101 |
| 1565797.1 | 2894587.1 | | ACGUUGA | | 2894588.1 | | AGUACCUCG | |
| AD- | A- | 1355 | AGGAUCUUCUGUGC | 81-101 | A- | 1799 | UCAACGTGCACAGA | 79-101 |
| 1565798.1 | 2894589.1 | | ACGUUGA | | 2894590.1 | | AGAUCCUCG | |
| AD- | A | 1356 | AGCUUCUUCUGUGC | 81-101 | A- | 1800 | UCAACGTGCACAGA | 79-101 |
| 1565799.1 | 2894591.1 | | ACGUUGA | | 2894592.1 | | AGAAGCUCG | |
| AD- | A- | 1357 | AGGUUCUUCUGUGC | 81-101 | A- | 1801 | UCAACGTGCACAGA | 79-101 |
| 1565451.1 | 2893978.1 | | ACGUUGA | | 2893979.1 | | AGAACCUCA | |
| AD- | A- | 1358 | GGUUCUUCUGUGCA | 82-102 | A- | 1802 | UGCAACGUGCACAG | 80-102 |
| 1565452.1 | 2893980.1 | | CGUUGCA | | 2893981.1 | | AAGAACCUC | |
| AD- | A- | 1359 | GGUUCUUCUGUGCA | 82-102 | A- | 1803 | UGCAACGUGCACAG | 80-102 |
| 1565696.1 | 2894436.1 | | CGUUGCA | | 2894437.1 | | AAGAACCUC | |
| AD- | A- | 1360 | GUUCUUCUGUGCAC | 83-101 | A- | 1804 | UCAACGTGCACAGA | 81-101 |
| 1565794.1 | 2894583.1 | | GUUGA | | 2894584.1 | | AGAACCU | |
| AD- | A- | 1361 | GUUCUUCUGUGCAC | 83-103 | A- | 1805 | UAGCAACGUGCACA | 81-103 |
| 1565453.1 | 2893982.1 | | GUUGCUA | | 2893983.1 | | GAAGAACCU | |
| AD- | A- | 1362 | UUCUUCUGUGCACG | 84-104 | A- | 1806 | UCAGCAACGUGCAC | 82-104 |
| 1565454.1 | 2893984.1 | | UUGCUGA | | 2893985.1 | | AGAAGAACC | |
| AD- | A- | 1363 | UCUUCUGUGCACGU | 85-105 | A- | 1807 | UGCAGCAACGUGCA | 83-105 |
| 1565455.1 | 2893986.1 | | UGCUGCA | | 2893987.1 | | CAGAAGAAC | |
| AD- | A- | 1364 | UCUUCUGUGCACGU | 85-105 | A- | 1808 | UGCAGCAACGUGCA | 83-105 |
| 1565456.1 | 2893988.1 | | UGCUGCA | | 2893989.1 | | CAGAAGAAC | |
| AD- | A- | 1365 | CUUCUGUGCACGUU | 86-106 | A- | 1809 | UUGCAGCAACGUGC | 84-106 |
| 1565457.1 | 2893990.1 | | GCUGCAA | | 2893991.1 | | ACAGAAGAA | |
| AD- | A- | 1366 | CUUCUGUGCACGUU | 86-106 | A- | 1810 | UUGCAGCAACGUGC | 84-106 |
| 1565697.1 | 2893990.1 | | GCUGCAA | | 2894438.1 | | ACAGAAGAA | |
| AD- | A- | 1367 | UUCUGUGCACGUUG | 87-107 | A- | 1811 | UCUGCAGCAACGUG | 85-107 |
| 1565698.1 | 2894439.1 | | CUGCAGA | | 2894440.1 | | CACAGAAGA | |
| AD- | A- | 1368 | UCUGUGCACGUUGC | 88-108 | A- | 1812 | UGCUGCAGCAACGU | 86-108 |
| 1565458.1 | 2893992.1 | | UGCAGCA | | 2893993.1 | | GCACAGAAG | |
| AD- | A- | 1369 | CUGUGCACGUUGCU | 89-109 | A- | 1813 | UAGCUGCAGCAACG | 87-109 |
| 1565459.1 | 2893994.1 | | GCAGCUA | | 2893995.1 | | UGCACAGAA | |
| AD- | A- | 1370 | CUGUGCACGUUGCU | 89-109 | A- | 1814 | UAGCTGCAGCAACG | 87-109 |
| 1565699.1 | 2893994.1 | | GCAGCUA | | 2894441.1 | | UGCACAGAA | |
| AD- | A- | 1371 | UGUGCACGUUGCUG | 90-110 | A- | 1815 | UAAGCUGCAGCAAC | 88-110 |
| 1565700.1 | 2894442.1 | | CAGCUUA | | 2894443.1 | | GUGCACAGA | |
| AD- | A- | 1372 | GUGCACGUUGCUGC | 91-111 | A- | 1816 | UAAAGCTGCAGCAA | 89-111 |
| 1565460.1 | 2893996.1 | | AGCUUUA | | 2893997.1 | | CGUGCACAG | |
| AD- | A- | 1373 | GCACGUUGCUGCAG | 93-113 | A- | 1817 | UCCAAAGCUGCAGC | 91-113 |
| 1565461.1 | 2893998.1 | | CUUUGGA | | 2893999.1 | | AACGUGCAC | |
| AD- | A- | 1374 | CACGUUGCUGCAGC | 94-114 | A- | 1818 | UCCCAAAGCUGCAG | 92-114 |
| 1565462.1 | 2894000.1 | | UUUGGGA | | 2894001.1 | | CAACGUGCA | |
| AD- | A- | 1375 | GAGAUGCCAGCUGU | 117-137 | A- | 1819 | UAGCTGGACAGCUG | 115-137 |
| 1565701.1 | 2894444.1 | | CCAGCUA | | 2894445.1 | | GCAUCUCAG | |
| AD- | A- | 1376 | GAUGCCAGCUGUCCA | 119-139 | A- | 1820 | UGCAGCTGGACAGC | 117-139 |
| 1565463.1 | 2894002.1 | | GCUGCA | | 2894003.1 | | UGGCAUCUC | |
| AD- | A- | 1377 | CUGUCCAGCUGCUGC | 127-147 | A- | 1821 | UCAGAAGCAGCAGC | 125-147 |
| 1565464.1 | 2894004.1 | | UUCUGA | | 2894005.1 | | UGGACAGCU | |
| AD- | A- | 1378 | CCAGCUGCUGCUUC | 131-151 | A- | 1822 | UAGGCCAGAAGCAG | 129-151 |
| 1565465.1 | 2894006.1 | | UGGCCUA | | 2894007.1 | | CAGCUGGAC | |
| AD- | A- | 1379 | CUGGCCUGCCUGGU | 144-164 | A- | 1823 | UUCCCACACCAGGC | 142-164 |
| 1565466.1 | 2894008.1 | | GUGGGAA | | 2894009.1 | | AGGCCAGAA | |
| AD- | A- | 1380 | CUGGCCUGCCUGGU | 144-164 | A- | 1824 | UUCCCACACCAGGC | 142-164 |
| 1565467.1 | 2894008.1 | | GUGGGAA | | 2894010.1 | | AGGCCAGAA | |
| AD- | A- | 1381 | CUGGCCUGCCUGGU | 144-164 | A- | 1825 | UUCCCACACCAGGC | 142-164 |
| 1565702.1 | 2894008.1 | | GUGGGAA | | 2894446.1 | | AGGCCAGAA | |
| AD- | A- | 1382 | UGGCCUGCCUGGUG | 145-165 | A- | 1826 | UAUCCCACACCAGG | 143-165 |
| 1565468.1 | 2894011.1 | | UGGGAUA | | 2894012.1 | | CAGGCCAGA | |
| AD- | A- | 1383 | GCCUGCCUGGUGUG | 147-167 | A- | 1827 | UACATCACACACCA | 145-167 |
| 1565469.1 | 2894013.1 | | UGAUGUA | | 2894014.1 | | GGCAGGCCA | |
| AD- | A- | 1384 | GCCUGCCUGGUGUG | 147-167 | A- | 1828 | UACATCCCACACCAG | 145-167 |
| 1565703.1 | 2894447.1 | | GGAUGUA | | 2894448.1 | | GCAGGCCA | |
| AD- | A- | 1385 | AGAGUGGCCGAUGC | 205-225 | A- | 1829 | UAUACUGGCAUCGG | 203-225 |
| 1565704.1 | 2894449.1 | | CAGUAUA | | 2894450.1 | | CCACUCUGG | |
| AD- | A- | 1386 | AGUGUGGCCAGUCC | 231-251 | A- | 1830 | UUCATUGGGACUG | 229-251 |
| 1565705.1 | 2894451.1 | | CAAUGAA | | 2894452.1 | | GCCACACUGA | |
| AD- | A- | 1387 | GUGUGGCCAGUCCC | 232-252 | A- | 1831 | UUUCAUTGGGACU | 230-252 |
| 1565470.1 | 2894015.1 | | AAUGAAA | | 2894016.1 | | GGCCACACUG | |
| AD- | A- | 1388 | GUGUGGCCAGUCCC | 232-252 | A- | 1832 | UTUCAUTGGGACUG | 230-252 |
| 1565471.1 | 2894015.1 | | AAUGAAA | | 2894017.1 | | GCCACACUG | |
| AD- | A- | 1389 | GCCAGGCCAUGUCAG | 271-291 | A- | 1833 | UGATGACUGACAUG | 269-291 |
| 1565472.1 | 2894018.1 | | UCAUCA | | 2894019.1 | | GCCUGGCUC | |
| AD- | A- | 1390 | GCCAGGCCAUGUCAG | 271-291 | A- | 1834 | UGAUGACTGACAUG | 269-291 |
| 1565473.1 | 2894018.1 | | UCAUCA | | 2894020.1 | | GCCUGGCUC | |
| AD- | A- | 1391 | GCCAGGCCAUGUCAG | 271-291 | A- | 1835 | UGAUGACUGACAU | 269-291 |
| 1565706.1 | 2894018.1 | | UCAUCA | | 2894453.1 | | GGCCUGGCUC | |
| AD- | A- | 1392 | GGCCAUGUCAGUCA | 275-295 | A- | 1836 | UUAUGGAUGACUG | 273-295 |
| 1565474.1 | 2894021.1 | | UCCAUAA | | 2894022.1 | | ACAUGGCCUG | |
| AD- | A- | 1393 | GACCUGGAGGCCACC | 327-347 | A- | 1837 | UGCUTUGGUGGCC | 325-347 |
| 1565707.1 | 2894454.1 | | AAAGCA | | 2894455.1 | | UCCAGGUCUA | |
| AD- | A- | 1394 | CUGGAGGCCACCAAA | 330-350 | A- | 1838 | UCGAGCTUUGGUG | 328-350 |
| 1565475.1 | 2894023.1 | | GCUCGA | | 2894024.1 | | GCCUCCAGGU | |
| AD- | A- | 1395 | GAAACCCAAACCAGA | 471-491 | A- | 1839 | UAACTCTCUGGUUU | 469-491 |
| 1565476.1 | 2894025.1 | | GAGUUA | | 2894026.1 | | GGGUUUCCA | |
| AD- | A- | 1396 | CAGCAACCUCCUCCG | 503-523 | Å- | 1840 | UUGTCTCGGAGGAG | 501-523 |
| 1565477.1 | 2894027.1 | | AGACAA | | 2894028.1 | | GUUGCUGUA | |
| AD- | A- | 1397 | CAGCAACCUCCUCCG | 503-523 | A- | 1841 | UUGUCUCGGAGGA | 501-523 |
| 1565708.1 | 2894027.1 | | AGACAA | | 2894456.1 | | GGUUGCUGUA | |
| AD- | A- | 1398 | GCAACCUCCUCCGAG | 505-525 | A- | 1842 | UCUTGTCUCGGAGG | 503-525 |
| 1565478.1 | 2894029.1 | | ACAAGA | | 2894030.1 | | AGGUUGCUG | |
| AD- | A- | 1399 | GCAACCUCCUCCGAG | 505-525 | A- | 1843 | UCUUGTCTCGGAGG | 503-525 |
| 1565479.1 | 2894029.1 | | ACAAGA | | 2894031.1 | | AGGUUGCUG | |
| AD- | A- | 1400 | GCAACCUCCUCCGAG | 505-525 | A- | 1844 | UCUUGUCUCGGAG | 503-525 |
| 1565709.1 | 2894029.1 | | ACAAGA | | 2894457.1 | | GAGGUUGCUG | |
| AD- | A- | 1401 | AGACAAGUCAGUUC | 518-538 | A- | 1845 | UCCUCCAGAACTGA | 516-538 |
| 1565480.1 | 2894032.1 | | UGGAGGA | | 2894033.1 | | CUUGUCUCG | |
| AD- | A- | 1402 | CAAGUCAGUUCUGG | 521-541 | A- | 1846 | UCUUCCTCCAGAAC | 519-541 |
| 1565481.1 | 2894034.1 | | AGGAAGA | | 2894035.1 | | UGACUUGUC | |
| AD- | A- | 1403 | GUCAGUUCUGGAGG | 524-544 | A- | 1847 | UUCUCUTCCUCCAG | 522-544 |
| 1565482.1 | 2894036.1 | | AAGAGAA | | 2894037.1 | | AACUGACUU | |
| AD- | A- | 1404 | AGAAUCUGGCCAGG | 568-588 | A- | 1848 | UCAACCTCCUGGCC | 566-588 |
| 1565483.1 | 2894038.1 | | AGGUUGA | | 2894039.1 | | AGAUUCUCA | |
| AD- | A- | 1405 | UGGCCAGGAGGUUG | 574-594 | A- | 1849 | UGCTUTCCAACCUCC | 572-594 |
| 1565484.1 | 2894040.1 | | GAAAGCA | | 2894041.1 | | UGGCCAGA | |
| AD- | A- | 1406 | UGGCCAGGAGGUUG | 574-594 | A- | 1850 | UGCUTUCCAACCUC | 572-594 |
| 1565710.1 | 2894040.1 | | GAAAGCA | | 2894458.1 | | CUGGCCAGA | |
| AD- | A- | 1407 | CAGCCAGGAGGUAG | 596-616 | A- | 1851 | UGCCTUGCUACCUC | 594-616 |
| 1565711.1 | 2894459.1 | | CAAGGCA | | 2894460.1 | | CUGGCUGCU | |
| AD- | A- | 1408 | UGCCACCAGGCUCCA | 661-681 | A- | 1852 | UUUCTCTGGAGCCU | 659-681 |
| 1565485.1 | 2894042.1 | | GAGAAA | | 2894043.1 | | GGUGGCACA | |
| AD- | A- | 1409 | AAUUUGGACACUUU | 693-713 | A- | 1853 | UAAGGCCAAAGUGU | 691-713 |
| 1565486.1 | 2894044.1 | | GGCCUUA | | 2894045.1 | | CCAAAUUCC | |
| AD- | A- | 1410 | AAUUUGGACACUUU | 693-713 | A- | 1854 | UAAGGCCAAAGUGU | 691-713 |
| 1565712.1 | 2894044.1 | | GGCCUUA | | 2894461.1 | | CCAAAUUCC | |
| AD- | A- | 1411 | ACACUUUGGCCUUCC | 700-720 | A- | 1855 | UUUCCUGGAAGGCC | 698-720 |
| 1565713.1 | 2894462.1 | | AGGAAA | | 2894463.1 | | AAAGUGUCC | |
| AD- | A- | 1412 | CUUUGGCCUUCCAG | 703-723 | A- | 1856 | UCAGTUCCUGGAAG | 701-723 |
| 1565487.1 | 2894046.1 | | GAACUGA | | 2894047.1 | | GCCAAAGUG | |
| AD- | A- | 1413 | AGGAACUGAAGUCC | 715-735 | A- | 1857 | UUAGCUCGGACUUC | 713-735 |
| 1565714.1 | 2894048.1 | | GAGCUAA | | 2894464.1 | | AGUUCCUGG | |
| AD- | A- | 1414 | AGGAACUGAAGUCC | 715-735 | A- | 1858 | UUAGCTCGGACUUC | 713-735 |
| 1565488.1 | 2894048.1 | | GAGCUAA | | 2894049.1 | | AGUUCCUGG | |
| AD- | A- | 1415 | GAAGUCCGAGCUAAC | 722-742 | A- | 1859 | UCUUCAGUUAGCUC | 720-742 |
| 1565715.1 | 2894465.1 | | UGAAGA | | 2894466.1 | | GGACUUCAG | |
| AD- | A- | 1416 | GCUAACUGAAGUUC | 731-751 | A- | 1860 | UAAGCAGGAACUUC | 729-751 |
| 1565716.1 | 2894467.1 | | CUGCUUA | | 2894468.1 | | AGUUAGCUC | |
| AD- | A- | 1417 | CUAACUGAAGUUCC | 732-752 | A- | 1861 | UGAAGCAGGAACUU | 730-752 |
| 1565489.1 | 2894050.1 | | UGCUUCA | | 2894051.1 | | CAGUUAGCU | |
| AD- | A- | 1418 | GAAGUUCCUGCUUC | 738-758 | A- | 1862 | UAUUCGGGAAGCA | 736-758 |
| 1565717.1 | 2894469.1 | | CCGAAUA | | 2894470.1 | | GGAACUUCAG | |
| AD- | A- | 1419 | GAGAACUAGUUUGG | 814-834 | A- | 1863 | UUCCTACCCAAACU | 812-834 |
| 1565718.1 | 2894052.1 | | GUAGGAA | | 2894471.1 | | AGUUCUCCA | |
| AD- | A- | 1420 | GAGAACUAGUUUGG | 814-834 | A- | 1864 | UUCCUACCCAAACU | 812-834 |
| 1565490.1 | 2894052.1 | | GUAGGAA | | 2894053.1 | | AGUUCUCCA | |
| AD- | A- | 1421 | ACUAGUUUGGGUAG | 818-838 | A- | 1865 | UGCUCUCCUACCCA | 816-838 |
| 1565719.1 | 2894054.1 | | GAGAGCA | | 2894472.1 | | AACUAGUUC | |
| AD- | A- | 1422 | ACUAGUUUGGGUAG | 818-838 | A- | 1866 | UGCTCTCUACCCAAA | 816-837 |
| 1565491.1 | 2894054.1 | | GAGAGCA | | 2894055.1 | | CUAGUUC | |
| AD- | A- | 1423 | GGGUAGGAGAGCCU | 826-846 | A- | 1867 | UCGUGAGAGGCUC | 824-846 |
| 1565720.1 | 2894473.1 | | CUCACGA | | 2894474.1 | | UCCUACCCAA | |
| AD- | A- | 1424 | GUAGGAGAGCCUCU | 828-848 | A- | 1868 | UAGCGUGAGAGGC | 826-848 |
| 1565721.1 | 2894475.1 | | CACGCUA | | 2894476.1 | | UCUCCUACCC | |
| AD- | A- | 1425 | GUAGGAGAGCCUCU | 828-848 | A- | 1869 | UAGCGUGAGAGGC | 826-848 |
| 1565492.1 | 2894056.1 | | CACGCUA | | 2894057.1 | | UCUCCUACCC | |
| AD- | A- | 1426 | UAGGAGAGCCUCUC | 829-849 | A- | 1870 | UCAGCGTGAGAGGC | 827-849 |
| 1565493.1 | 2894058.1 | | ACGCUGA | | 2894059.1 | | UCUCCUACC | |
| AD- | A- | 1427 | AGGAGAGCCUCUCAC | 830-850 | A- | 1871 | UUCAGCGUGAGAG | 828-850 |
| 1565722.1 | 2894477.1 | | GCUGAA | | 2894478.1 | | GCUCUCCUAC | |
| AD- | A- | 1428 | GCCUCUCACGCUGAG | 836-856 | A- | 1872 | UCUGTUCUCAGCGU | 834-856 |
| 1565723.1 | 2894060.1 | | AACAGA | | 2894479.1 | | GAGAGGCUC | |
| AD- | A- | 1429 | GCCUCUCACGCUGAG | 836-856 | A- | 1873 | UCUGUTCUCAGCGU | 834-856 |
| 1565494.1 | 2894060.1 | | AACAGA | | 2894061.1 | | GAGAGGCUC | |
| AD- | A- | 1430 | GCCUCUCACGCUGAG | 836-856 | A- | 1874 | UCUGUTCTCAGCGU | 834-856 |
| 1565495.1 | 2894060.1 | | AACAGA | | 2894062.1 | | GAGAGGCUC | |
| AD- | A- | 1431 | CACGCUGAGAACAGC | 842-862 | A- | 1875 | UUUUCUGCUGUUC | 840-862 |
| 1565724.1 | 2894480.1 | | AGAAAA | | 2894481.1 | | UCAGCGUGAG | |
| AD- | A- | 1432 | ACGCUGAGAACAGCA | 843-863 | A- | 1876 | UGUUTCTGCUGUUC | 841-863 |
| 1565496.1 | 2894063.1 | | GAAACA | | 2894064.1 | | UCAGCGUGA | |
| AD- | A- | 1433 | CGCUGAGAACAGCAG | 844-864 | A- | 1877 | UUGUTUCUGCUGU | 842-864 |
| 1565725.1 | 2894065.1 | | AAACAA | | 2894482.1 | | UCUCAGCGUG | |
| AD- | A- | 1434 | CGCUGAGAACAGCAG | 844-864 | A- | 1878 | UUGTUTCUGCUGUU | 842-864 |
| 1565497.1 | 2894065.1 | | AAACAA | | 2894066.1 | | CUCAGCGUG | |
| AD- | A- | 1435 | GCUGAGAACAGCAGA | 845-865 | Å- | 1879 | UUUGTUTCUGCUGU | 843-865 |
| 1565498.1 | 2894067.1 | | AACAAA | | 2894068.1 | | UCUCAGCGU | |
| AD- | A- | 1436 | CUGAGAACAGCAGAA | 846-866 | A- | 1880 | UAUUGUTUCUGCU | 844-866 |
| 1565499.1 | 2894069.1 | | ACAAUA | | 2894070.1 | | GUUCUCAGCG | |
| AD- | A- | 1437 | UGAGAACAGCAGAAA | 847-867 | A- | 1881 | UAAUTGTUUCUGCU | 845-867 |
| 1565500.1 | 2894071.1 | | CAAUUA | | 2894072.1 | | GUUCUCAGC | |
| AD- | A- | 1438 | GAGAACAGCAGAAAC | 848-868 | A- | 1882 | UUAATUGUUUCUG | 846-868 |
| 1565726.1 | 2894483.1 | | AAUUAA | | 2894484.1 | | CUGUUCUCAG | |
| AD- | A- | 1439 | AGAACAGCAGAAACA | 849-869 | A- | 1883 | UGUAAUTGUUUCU | 847-869 |
| 1565501.1 | 2894073.1 | | AUUACA | | 2894074.1 | | GCUGUUCUCA | |
| AD- | A- | 1440 | AGAACAGCAGAAACA | 849-869 | A- | 1884 | UGUAAUTGUUUCU | 847-869 |
| 1565502.1 | 2894075.1 | | AUUACA | | 2894076.1 | | GCUGUUCUCA | |
| AD- | A- | 1441 | GAACAGCAGAAACAA | 850-870 | A- | 1885 | UAGUAATUGUUTCU | 848-870 |
| 1565503.1 | 2894077.1 | | UUACUA | | 2894078.1 | | GCUGUUCUC | |
| AD- | A- | 1442 | AACAGCAGAAACAAU | 851-871 | A- | 1886 | UCAGTAAUUGUUUC | 849-871 |
| 1565801.1 | 1991726.1 | | UACUGA | | 2894595.1 | | UGCUGUUCU | |
| AD- | A- | 1443 | AACAGCAGAAACAAU | 851-871 | A- | 1887 | UCAGTAAUUGUUUC | 849-871 |
| 1565802.1 | 1991726.1 | | UACUGA | | 2894596.1 | | UGCUGUUCU | |
| AD- | A- | 1444 | AACACCAGAAACAAU | 851-871 | A- | 1888 | UCAGTAAUUGUTUC | 849-871 |
| 1565803.1 | 2894597.1 | | UACUGA | | 2894598.1 | | UGGUGUUCU | |
| AD- | A- | 1445 | AACUGCAGAAACAAU | 851-871 | A- | 1889 | UCAGTAAUUGUTUC | 849-871 |
| 1565804.1 | 2894599.1 | | UACUGA | | 2894600.1 | | UGCAGUUCU | |
| AD- | A- | 1446 | AAGAGCAGAAACAAU | 851-871 | A- | 1890 | UCAGTAAUUGUTUC | 849-871 |
| 1565805.1 | 2894601.1 | | UACUGA | | 2894602.1 | | UGCUCUUCU | |
| AD- | A- | 1447 | AACAGCAGAAACAAU | 851-871 | A- | 1891 | UCAGUAAUUGUUU | 849-871 |
| 1073418.5 | 1991726.1 | | UACUGA | | 1802980.1 | | CUGCUGUUCU | |
| AD- | A- | 1448 | AACAGCAGAAACAAU | 851-871 | A- | 1892 | UCAGTAAUUGUTUC | 849-871 |
| 1565504.1 | 2894079.1 | | UACUGA | | 2894080.1 | | UGCUGUUCU | |
| AD- | A- | 1449 | AACAGCAGAAACAAU | 851-871 | A- | 1893 | UCAGTAAUUGUTUC | 849-871 |
| 1565504.2 | 2894079.1 | | UACUGA | | 2894080.1 | | UGCUGUUCU | |
| AD- | A- | 1450 | ACAGCAGAAACAAUU | 852-872 | A- | 1894 | UCCAGUAAUUGTUU | 850-872 |
| 1565505.1 | 2894081.1 | | ACUGGA | | 2894082.1 | | CUGCUGUUC | |
| AD- | A- | 1451 | CAGCAGAAACAAUUA | 853-871 | A- | 1895 | UCAGTAAUUGUTUC | 851-871 |
| 1565800.1 | 2894593.1 | | CUGA | | 2894594.1 | | UGCUGUU | |
| AD- | A- | 1452 | CAGCAGAAACAAUUA | 853-873 | A- | 1896 | UGCCAGTAAUUGUU | 851-873 |
| 1565506.1 | 2894083.1 | | CUGGCA | | 2894084.1 | | UCUGCUGUU | |
| AD- | A- | 1453 | AGCAGAAACAAUUAC | 854-874 | A- | 1897 | UUGCCAGUAAUUG | 852-874 |
| 1565727.1 | 2894485.1 | | UGGCAA | | 2894486.1 | | UUUCUGCUGU | |
| AD- | A- | 1454 | GCAGAAACAAUUACU | 855-875 | A- | 1898 | UUUGCCAGUAAUU | 853-875 |
| 1565507.1 | 2894085.1 | | GGCAAA | | 2894086.1 | | GUUUCUGCUG | |
| AD- | A- | 1455 | CAGAAACAAUUACUG | 856-876 | A- | 1899 | UCUUGCCAGUAAU | 854-876 |
| 1565728.1 | 1577510.1 | | GCAAGA | | 2894487.1 | | UGUUUCUGCU | |
| AD- | A- | 1456 | CAGAAACAAUUACUG | 856-876 | A- | 1900 | UCUUGCCAGUAAU | 854-876 |
| 1565508.1 | 1577510.1 | | GCAAGA | | 2894087.1 | | UGUUUCUGCU | |
| AD- | A- | 1457 | AGAAACAAUUACUG | 857-877 | A- | 1901 | UACUTGACAGUAAU | 855-877 |
| 1565509.1 | 2894088.1 | | UCAAGUA | | 2894089.1 | | UGUUUCUGC | |
| AD- | A- | 1458 | GAAACAAUUACUGG | 858-878 | A- | 1902 | UUACTUGCCAGUAA | 856-878 |
| 1565730.1 | 2894490.1 | | CAAGUAA | | 2894491.1 | | UUGUUUCUG | |
| AD- | A- | 1459 | AAACAAUUACUGGCA | 859-879 | A- | 1903 | UAUACUTGCCAGUA | 857-879 |
| 1565510.1 | 2894090.1 | | AGUAUA | | 2894091.1 | | AUUGUUUCU | |
| AD- | A- | 1460 | AACAAUUACUGGCAA | 860-880 | A- | 1904 | UCAUACTUGCCAGU | 858-880 |
| 1565511.1 | 2894092.1 | | GUAUGA | | 2894093.1 | | AAUUGUUUC | |
| AD- | A- | 1461 | AACAAUUACUGGCAA | 860-880 | A- | 1905 | UCAUACTUGCCAGU | 858-880 |
| 1565512.1 | 2894094.1 | | GUAUGA | | 2894095.1 | | AAUUGUUUC | |
| AD- | A- | 1462 | GGCAAGUAUGGUGU | 870-890 | A- | 1906 | UAUCCACACACCAU | 868-890 |
| 1565731.1 | 2894096.1 | | GUGGAUA | | 2894492.1 | | ACUUGCCAG | |
| AD- | A- | 1463 | GGCAAGUAUGGUGU | 870-890 | A- | 1907 | UAUCCACACACCAU | 868-890 |
| 1565513.1 | 2894096.1 | | GUGGAUA | | 2894097.1 | | ACUUGCCAG | |
| AD- | A- | 1464 | GGCAAGUAUGGUGU | 870-890 | A- | 1908 | UAUCCACACACCAU | 868-890 |
| 1565514.1 | 2894096.1 | | GUGGAUA | | 2894098.1 | | ACUUGCCAG | |
| AD- | A- | 1465 | CAAGUAUGGUGUGU | 872-892 | A- | 1909 | UGCATCCACACACCA | 870-892 |
| 1565732.1 | 2894099.1 | | GGAUGCA | | 2894493.1 | | UACUUGCC | |
| AD- | A- | 1466 | CAAGUAUGGUGUGU | 872-892 | A- | 1910 | UGCAUCCACACACC | 870-892 |
| 1565515.1 | 2894099.1 | | GGAUGCA | | 2894100.1 | | AUACUUGCC | |
| AD- | A- | 1467 | UGAGUAUGACCUCA | 974-994 | A- | 1911 | UGGCTGAUGAGGUC | 972-994 |
| 1565516.1 | 2894101.1 | | UCAGCCA | | 2894102.1 | | AUACUCAAA | |
| AD- | A- | 1468 | GAGUAUGACCUCAU | 975-995 | A- | 1912 | UUGGCUGAUGAGG | 973-995 |
| 1565733.1 | 2894494.1 | | CAGCCAA | | 2894495.1 | | UCAUACUCAA | |
| AD- | A- | 1469 | AGUAUGACCUCAUCA | 976-996 | A- | 1913 | UCUGGCTGAUGAGG | 974-996 |
| 1565517.1 | 2894103.1 | | GCCAGA | | 2894104.1 | | UCAUACUCA | |
| AD- | A- | 1470 | GUAUGACCUCAUCA | 977-997 | A- | 1914 | UACUGGCUGAUGA | 975-997 |
| 1565734.1 | 2894105.1 | | GCCAGUA | | 2894496.1 | | GGUCAUACUC | |
| AD- | A- | 1471 | GUAUGACCUCAUCA | 977-997 | A- | 1915 | UACUGGCTGAUGAG | 975-997 |
| 1565518.1 | 2894105.1 | | GCCAGUA | | 2894106.1 | | GUCAUACUC | |
| AD- | A- | 1472 | UAUGACCUCAUCAGC | 978-998 | A- | 1916 | UAACTGGCUGAUGA | 976-998 |
| 1565735.1 | 2894497.1 | | CAGUUA | | 2894498.1 | | GGUCAUACU | |
| AD- | A- | 1473 | AUGACCUCAUCAGCC | 979-999 | A- | 1917 | UAAACUGGCUGAU | 977-999 |
| 1565736.1 | 2894499.1 | | AGUUUA | | 2894500.1 | | GAGGUCAUAC | |
| AD- | A- | 1474 | UGACCUCAUCAGCCA | 980-1000 | A- | 1918 | UUAAACTGGCUGAU | 978-1000 |
| 1565519.1 | 2894107.1 | | GUUUAA | | 2894108.1 | | GAGGUCAUA | |
| AD- | A- | 1475 | GACCUCAUCAGCCAG | 981-1001 | A- | 1919 | UAUAAACUGGCTGA | 979-1001 |
| 1565520.1 | 2894109.1 | | UUUAUA | | 2894110.1 | | UGAGGUCAU | |
| AD- | A- | 1476 | ACCUCAUCAGCCAGU | 982-1002 | A- | 1920 | UCAUAAACUGGCUG | 980-1002 |
| 1565521.1 | 2894111.1 | | UUAUGA | | 2894112.1 | | AUGAGGUCA | |
| AD- | A- | 1477 | CCUCAUCAGCCAGUU | 983-1003 | A- | 1921 | UGCAUAAACUGGCU | 981-1003 |
| 1244360.3 | 2298063.1 | | UAUGCA | | 1803173.1 | | GAUGAGGUC | |
| AD- | A- | 1478 | CCUCAUCAGCCAGUU | 983-1003 | A- | 1922 | UGCATAAACUGGCU | 981-1003 |
| 1565522.1 | 2894113.1 | | UAUGCA | | 2894114.1 | | GAUGAGGUC | |
| AD- | A- | 1479 | CCUCAUCAGCCAGUU | 983-1003 | A- | 1923 | UGCATAAACUGGCU | 981-1003 |
| 1565806.1 | 2298063.1 | | UAUGCA | | 2894603.1 | | GAUGAGGUC | |
| AD- | A- | 1480 | CCUCAUCAGCCAGUU | 983-1003 | A- | 1924 | UGCATAAACUGGCU | 981-1003 |
| 1565807.1 | 2298063.1 | | UAUGCA | | 2894604.1 | | GAUGAGGUC | |
| AD- | A- | 1481 | CCUCAUCAGCCAGUU | 983-1003 | A- | 1925 | UGCATAAACUGGCU | 981-1003 |
| 1565808.1 | 2894113.1 | | UAUGCA | | 2894605.1 | | GAUGAGGUC | |
| AD- | A- | 1482 | CCUCAUCAGCCAGUU | 983-1003 | A- | 1926 | UGCATAAACUGGCU | 981-1003 |
| 1565809.1 | 2894606.1 | | UAUGCA | | 2894603.1 | | GAUGAGGUC | |
| AD- | A- | 1483 | CCUCAUCAGCCAGUU | 983-1003 | A- | 1927 | UGCATAAACUGGCU | 981-1003 |
| 1565810.1 | 2894607.1 | | UAUGCA | | 2894608.1 | | GAUGAGGUC | |
| AD- | A- | 1484 | CCUCUUCAGCCAGUU | 983-1003 | A- | 1928 | UGCATAAACUGGCU | 981-1003 |
| 1565812.1 | 2894611.1 | | UAUGCA | | 2894612.1 | | GAAGAGGUC | |
| AD- | A- | 1485 | CCUGAUCAGCCAGUU | 983-1003 | A- | 1929 | UGCATAAACUGGCU | 981-1003 |
| 1565813.1 | 2894613.1 | | UAUGCA | | 2894614.1 | | GAUCAGGUC | |
| AD- | A- | 1486 | CCACAUCAGCCAGUU | 983-1003 | A- | 1930 | UGCATAAACUGGCU | 981-1003 |
| 1565814.1 | 2894615.1 | | UAUGCA | | 2894616.1 | | GAUGUGGUC | |
| AD- | A- | 1487 | CCUCAUCAGCCAGUU | 983-1003 | A- | 1931 | UGCATAAACUGGCU | 981-1003 |
| 1565522.2 | 2894113.1 | | UAUGCA | | 2894114.1 | | GAUGAGGUC | |
| AD- | A- | 1488 | CUCAUCAGCCAGUUU | 984-1004 | A- | 1932 | UTGCAUAAACUGGC | 982-1004 |
| 1565523.1 | 2894115.1 | | AUGCAA | | 2894116.1 | | UGAUGAGGU | |
| AD- | A- | 1489 | UCAUCAGCCAGUUU | 985-1003 | A- | 1933 | UGCATAAACUGGCU | 983-1003 |
| 1565811.1 | 2894609.1 | | AUGCA | | 2894610.1 | | GAUGAGG | |
| AD- | A- | 1490 | UCAUCAGCCAGUUU | 985-1005 | A- | 1934 | UCUGCATAAACUGG | 983-1005 |
| 1565524.1 | 2894117.1 | | AUGCAGA | | 2894118.1 | | CUGAUGAGG | |
| AD- | A- | 1491 | UCAUCAGCCAGUUU | 985-1005 | A- | 1935 | UCUGCATAAACTGG | 983-1005 |
| 1565525.1 | 2894119.1 | | AUGCAGA | | 2894120.1 | | CUGAUGAGG | |
| AD- | A- | 1492 | CAUCAGCCAGUUUA | 986-1006 | A- | 1936 | UCCUGCAUAAACUG | 984-1006 |
| 1565526.1 | 2894121.1 | | UGCAGGA | | 2894122.1 | | GCUGAUGAG | |
| AD- | A- | 1493 | AUCAGCCAGUUUAU | 987-1007 | A- | 1937 | UCCCTGCAUAAACU | 985-1007 |
| 1565737.1 | 2894123.1 | | GCAGGGA | | 2894501.1 | | GGCUGAUGA | |
| AD- | A- | 1494 | AUCAGCCAGUUUAU | 987-1007 | A- | 1938 | UCCCUGCAUAAACU | 985-1007 |
| 1565527.1 | 2894123.1 | | GCAGGGA | | 2894124.1 | | GGCUGAUGA | |
| AD- | A- | 1495 | UCAGCCAGUUUAUG | 988-1008 | A- | 1939 | UGCCCUGCAUAAAC | 986-1008 |
| 1565738.1 | 2894502.1 | | CAGGGCA | | 2894503.1 | | UGGCUGAUG | |
| AD- | A- | 1496 | CAGCCAGUUUAUGC | 989-1009 | A- | 1940 | UAGCCCTGCAUAAA | 987-1009 |
| 1565528.1 | 2894125.1 | | AGGGCUA | | 2894126.1 | | CUGGCUGAU | |
| AD- | A- | 1497 | AGCCAGUUUAUGCA | 990-1010 | A- | 1941 | UUAGCCCUGCAUAA | 988-1010 |
| 1565739.1 | 2894127.1 | | GGGCUAA | | 2894504.1 | | ACUGGCUGA | |
| AD- | A- | 1498 | AGCCAGUUUAUGCA | 990-1010 | A- | 1942 | UUAGCCCTGCAUAA | 988-1010 |
| 1565529.1 | 2894127.1 | | GGGCUAA | | 2894128.1 | | ACUGGCUGA | |
| AD- | A- | 1499 | GCCAGUUUAUGCAG | 991-1011 | A- | 1943 | UGUAGCCCUGCAUA | 989-1011 |
| 1565740.1 | 2894505.1 | | GGCUACA | | 2894506.1 | | AACUGGCUG | |
| AD- | A- | 1500 | GCCAGUUUAUGCAG | 991-1011 | A- | 1944 | UGUAGCACUGCAUA | 989-1011 |
| 1565530.1 | 2894129.1 | | UGCUACA | | 2894130.1 | | AACUGGCUG | |
| AD- | A- | 1501 | CCAGUUUAUGCAGG | 992-1012 | A- | 1945 | UGGUAGCCCUGCAU | 990-1012 |
| 1565741.1 | 2894507.1 | | GCUACCA | | 2894508.1 | | AAACUGGCU | |
| AD- | A- | 1502 | CCAGUUUAUGCAGG | 992-1012 | A- | 1946 | UGGUAGACCUGCAU | 990-1012 |
| 1565531.1 | 2894131.1 | | UCUACCA | | 2894132.1 | | AAACUGGCU | |
| AD- | A- | 1503 | UGCAGGGCUACCCU | 1000-1020 | A- | 1947 | UCUUAGAAGGGTAG | 998-1020 |
| 1565532.1 | 2894133.1 | | UCUAAGA | | 2894134.1 | | CCCUGCAUA | |
| AD- | A- | 1504 | GGGUGCUGUGGUGU | 1052-1072 | A- | 1948 | UCCGAGTACACCAC | 1050-1072 |
| 1565533.1 | 2894135.1 | | ACUCGGA | | 2894136.1 | | AGCACCCGU | |
| AD- | A- | 1505 | GGGUGCUGUGGUGU | 1052-1072 | A- | 1949 | UCCGAGTACACCAC | 1050-1072 |
| 1565534.1 | 2894137.1 | | ACUCGGA | | 2894138.1 | | AGCACCCGU | |
| AD- | A- | 1506 | GAGCCUCUAUUUCCA | 1073-1093 | A- | 1950 | UCGCCCTGGAAAUA | 1071-1093 |
| 1565535.1 | 2894139.1 | | GGGCGA | | 2894140.1 | | GAGGCUCCC | |
| AD- | A- | 1507 | GAGCCUCUAUUUCCA | 1073-1093 | A- | 1951 | UCGCCCTGGAAAUA | 1071-1093 |
| 1565536.1 | 2894141.1 | | GGGCGA | | 2894142.1 | | GAGGCUCCC | |
| AD- | A- | 1508 | CCUCUAUUUCCAGG | 1076-1096 | A- | 1952 | UCAGCGCCCUGGAA | 1074-1096 |
| 1565537.1 | 2894143.1 | | GCGCUGA | | 2894144.1 | | AUAGAGGCU | |
| AD- | A- | 1509 | UUCCAGGGCGCUGA | 1083-1103 | A- | 1953 | UCUGGACUCAGCGC | 1081-1103 |
| 1565742.1 | 2894145.1 | | GUCCAGA | | 2894509.1 | | CCUGGAAAU | |
| AD- | A- | 1510 | UUCCAGGGCGCUGA | 1083-1103 | A- | 1954 | UCUGGACUCAGCGC | 1081-1103 |
| 1565538.1 | 2894145.1 | | GUCCAGA | | 2894146.1 | | CCUGGAAAU | |
| AD- | A- | 1511 | UUCCAGGGCGCUGA | 1083-1103 | A- | 1955 | UCUGGACTCAGCGC | 1081-1103 |
| 1565539.1 | 2894145.1 | | GUCCAGA | | 2894147.1 | | CCUGGAAAU | |
| AD- | A- | 1512 | AGGGCGCUGAGUCC | 1087-1107 | A- | 1956 | UAGUTCTGGACUCA | 1085-1107 |
| 1565540.1 | 2894148.1 | | AGAACUA | | 2894149.1 | | GCGCCCUGG | |
| AD- | A- | 1513 | GGGCGCUGAGUCCA | 1088-1108 | A- | 1957 | UCAGTUCUGGACUC | 1086-1108 |
| 1565743.1 | 2894150.1 | | GAACUGA | | 2894510.1 | | AGCGCCCUG | |
| AD- | A- | 1514 | GGGCGCUGAGUCCA | 1088-1108 | A- | 1958 | UCAGUTCUGGACUC | 1086-1108 |
| 1565541.1 | 2894150.1 | | GAACUGA | | 2894151.1 | | AGCGCCCUG | |
| AD- | A- | 1515 | GGGCGCUGAGUCCA | 1088-1108 | A- | 1959 | UCAGTUCUGGACUC | 1086-1108 |
| 1565542.1 | 2894152.1 | | GAACUGA | | 2894153.1 | | AGCGCCCUG | |
| AD- | A- | 1516 | GGCGCUGAGUCCAG | 1089-1109 | A- | 1960 | UACAGUTCUGGACU | 1087-1109 |
| 1565543.1 | 2894154.1 | | AACUGUA | | 2894155.1 | | CAGCGCCCU | |
| AD- | A- | 1517 | GCGCUGAGUCCAGA | 1090-1110 | A- | 1961 | UGACAGTUCUGGAC | 1088-1110 |
| 1565544.1 | 2894156.1 | | ACUGUCA | | 2894157.1 | | UCAGCGCCC | |
| AD- | A- | 1518 | CGCUGAGUCCAGAAC | 1091-1111 | A- | 1962 | UUGACAGUUCUGG | 1089-1111 |
| 1565744.1 | 2894511.1 | | UGUCAA | | 2894512.1 | | ACUCAGCGCC | |
| AD- | A- | 1519 | GCUGAGUCCAGAAC | 1092-1112 | A- | 1963 | UAUGACAGUUCUG | 1090-1112 |
| 1565545.1 | 2894158.1 | | UGUCAUA | | 2894159.1 | | GACUCAGCGC | |
| AD- | A- | 1520 | CUGAGUCCAGAACU | 1093-1113 | A- | 1964 | UUAUGACAGUUCU | 1091-1113 |
| 1565745.1 | 1577552.1 | | GUCAUAA | | 2894513.1 | | GGACUCAGCG | |
| AD- | A- | 1521 | CUGAGUCCAGAACU | 1093-1113 | A- | 1965 | UUATGACAGUUCUG | 1091-1113 |
| 1565546.1 | 1577552.1 | | GUCAUAA | | 2894160.1 | | GACUCAGCG | |
| AD- | A- | 1522 | CUGAGUCCAGAACU | 1093-1113 | A- | 1966 | UUAUGACAGUUCU | 1091-1113 |
| 1565547.1 | 1577552.1 | | GUCAUAA | | 2894161.1 | | GGACUCAGCG | |
| AD- | A- | 1523 | UGAGUCCAGAACUG | 1094-1114 | A- | 1967 | UUUATGACAGUUCU | 1092-1114 |
| 1565548.1 | 2894162.1 | | UCAUAAA | | 2894163.1 | | GGACUCAGC | |
| AD- | A- | 1524 | GAGUCCAGAACUGU | 1095-1115 | A- | 1968 | UCUUAUGACAGUU | 1093-1115 |
| 1565746.1 | 1577518.1 | | CAUAAGA | | 2894514.1 | | CUGGACUCAG | |
| AD- | A- | 1525 | GAGUCCAGAACUGU | 1095-1115 | A- | 1969 | UCUUAUGACAGTUC | 1093-1115 |
| 1565549.1 | 2894164.1 | | CAUAAGA | | 2894165.1 | | UGGACUCAG | |
| AD- | A- | 1526 | AGUCCAGAACUGUCA | 1096-1116 | A- | 1970 | UUCUTATGACAGUU | 1094-1116 |
| 1565550.1 | 2894166.1 | | UAAGAA | | 2894167.1 | | CUGGACUCA | |
| AD- | A- | 1527 | AGUCCAGAACUGUCA | 1096-1116 | A- | 1971 | UTCUTATGACAGUU | 1094-1116 |
| 1565551.1 | 2894168.1 | | UAAGAA | | 2894169.1 | | CUGGACUCA | |
| AD- | A- | 1528 | GUCCAGAACUGUCA | 1097-1117 | A- | 1972 | UAUCUUAUGACAG | 1095-1117 |
| 1244365.3 | 2324726.1 | | UAAGAUA | | 1803353.1 | | UUCUGGACUC | |
| AD- | A- | 1529 | GUCCAGAACUGUCA | 1097-1117 | A- | 1973 | UAUCTUAUGACAGU | 1095-1117 |
| 1565552.1 | 2894170.1 | | UAAGAUA | | 2894171.1 | | UCUGGACUC | |
| AD- | A- | 1530 | GUCCAGAACUGUCA | 1097-1117 | A- | 1974 | UAUCTUAUGACAGU | 1095-1117 |
| 1565553.1 | 2894170.1 | | UAAGAUA | | 2894172.1 | | UCUGGACUC | |
| AD- | A- | 1531 | GUCCAGAACUGUCA | 1097-1117 | A- | 1975 | UAUCTUAUGACAGU | 1095-1117 |
| 1565815.1 | 2894170.1 | | UAAGAUA | | 2894617.1 | | UCUGGACUC | |
| AD- | A- | 1532 | GUCCAGAACUGUCA | 1097-1117 | A- | 1976 | UAUCTUAUGACAGU | 1095-1117 |
| 1565816.1 | 2894170.1 | | UAAGAUA | | 2894618.1 | | UCUGGACUC | |
| AD- | A- | 1533 | GUCCUGAACUGUCA | 1097-1117 | A- | 1977 | UAUCTUAUGACAGU | 1095-1117 |
| 1565818.1 | 2894621.1 | | UAAGAUA | | 2894622.1 | | UCAGGACUC | |
| AD- | A- | 1534 | GUCGAGAACUGUCA | 1097-1117 | A- | 1978 | UAUCTUAUGACAGU | 1095-1117 |
| 1565819.1 | 2894623.1 | | UAAGAUA | | 2894624.1 | | UCUCGACUC | |
| AD- | A- | 1535 | GUGCAGAACUGUCA | 1097-1117 | A- | 1979 | UAUCTUAUGACAGU | 1095-1117 |
| 1565820.1 | 2894625.1 | | UAAGAUA | | 2894626.1 | | UCUGGACUC | |
| AD- | A- | 1536 | GUCCAGAACUGUCA | 1097-1117 | A- | 1980 | UAUCTUAUGACAGU | 1095-1117 |
| 1565552.2 | 2894170.1 | | UAAGAUA | | 2894171.1 | | UCUGGACUC | |
| AD- | A- | 1537 | GUCCAGAACUGUCA | 1097-1117 | A- | 1981 | UAUCTUAUGACAGU | 1095-1117 |
| 1565553.2 | 2894170.1 | | UAAGAUA | | 2894172.1 | | UCUGGACUC | |
| AD- | A- | 1538 | UCCAGAACUGUCAUA | 1098-1118 | A- | 1982 | UUAUCUTAUGACAG | 1096-1118 |
| 1565554.1 | 2894173.1 | | AGAUAA | | 2894174.1 | | UUCUGGACU | |
| AD- | A- | 1539 | CCAGAACUGUCAUAA | 1099-1117 | A- | 1983 | UAUCTUAUGACAGU | 1097-1117 |
| 1565817.1 | 2894619.1 | | GAUA | | 2894620.1 | | UCUGGGC | |
| AD- | A- | 1540 | CCAGAACUGUCAUAA | 1099-1119 | A- | 1984 | UAUATCTUAUGACA | 1097-1119 |
| 1565555.1 | 2894175.1 | | GAUAUA | | 2894176.1 | | GUUCUGGAC | |
| AD- | A- | 1541 | CAGAACUGUCAUAA | 1100-1120 | A- | 1985 | UCAUAUCUUAUGAC | 1098-1120 |
| 1565747.1 | 2894177.1 | | GAUAUGA | | 2894515.1 | | AGUUCUGGA | |
| AD- | A- | 1542 | CAGAACUGUCAUAA | 1100-1120 | A- | 1986 | UCATATCUUAUGAC | 1098-1120 |
| 1565556.1 | 2894177.1 | | GAUAUGA | | 2894178.1 | | AGUUCUGGA | |
| AD- | A- | 1543 | CAGAACUGUCAUAA | 1100-1120 | A- | 1987 | UCAUAUCUUAUGAC | 1098-1120 |
| 1565557.1 | 2894179.1 | | GAUAUGA | | 2894180.1 | | AGUUCUGGA | |
| AD- | A- | 1544 | AGAACUGUCAUAAG | 1101-1121 | A- | 1988 | UUCATATCUUAUGA | 1099-1121 |
| 1565558.1 | 2894181.1 | | AUAUGAA | | 2894182.1 | | CAGUUCUGG | |
| AD- | A- | 1545 | AGAACUGUCAUAAG | 1101-1121 | A- | 1989 | UTCATATCUUATGAC | 1099-1121 |
| 1565559.1 | 2894183.1 | | AUAUGAA | | 2894184.1 | | AGUUCUGG | |
| AD- | A- | 1546 | GAACUGUCAUAAGA | 1102-1122 | A- | 1990 | UCUCAUAUCUUAU | 1100-1122 |
| 1565560.1 | 2894185.1 | | UAUGAGA | | 2894186.1 | | GACAGUUCUG | |
| AD- | A- | 1547 | AACUGUCAUAAGAU | 1103-1123 | A- | 1991 | UGCUCATAUCUUAU | 1101-1123 |
| 1565561.1 | 2894187.1 | | AUGAGCA | | 2894188.1 | | GACAGUUCU | |
| AD- | A- | 1548 | ACUGUCAUAAGAUA | 1104-1124 | A- | 1992 | UAGCTCAUAUCUUA | 1102-1124 |
| 1565562.1 | 2894189.1 | | UGAGCUA | | 2894190.1 | | UGACAGUUC | |
| AD- | A- | 1549 | CUGUCAUAAGAUAU | 1105-1125 | A- | 1993 | UCAGCUCAUAUCUU | 1103-1125 |
| 1565748.1 | 2894191.1 | | GAGCUGA | | 2894516.1 | | AUGACAGUU | |
| AD- | A- | 1550 | CUGUCAUAAGAUAU | 1105-1125 | A- | 1994 | UCAGCTCAUAUCUU | 1103-1125 |
| 1565563.1 | 2894191.1 | | GAGCUGA | | 2894192.1 | | AUGACAGUU | |
| AD- | A- | 1551 | CUGUCAUAAGAUAU | 1105-1125 | A- | 1995 | UCAGCTCAUAUCUU | 1103-1125 |
| 1565564.1 | 2894191.1 | | GAGCUGA | | 2894193.1 | | AUGACAGUU | |
| AD- | A- | 1552 | UGUCAUAAGAUAUG | 1106-1126 | A- | 1996 | UUCAGCTCAUAUCU | 1104-1126 |
| 1565565.1 | 2894194.1 | | AGCUGAA | | 2894195.1 | | UAUGACAGU | |
| AD- | A- | 1553 | CAUAAGAUAUGAGC | 1109-1129 | A- | 1997 | UUAUTCAGCUCAUA | 1107-1129 |
| 1565566.1 | 2894196.1 | | UGAAUAA | | 2894197.1 | | UCUUAUGAC | |
| AD- | A- | 1554 | CUGAAUACCGAGACA | 1122-1142 | A- | 1998 | UUUCACTGUCUCGG | 1120-1142 |
| 1565567.1 | 2894198.1 | | GUGAAA | | 2894199.1 | | UAUUCAGCU | |
| AD- | A- | 1555 | UACCGAGACAGUGA | 1127-1147 | A- | 1999 | UCAGCCTUCACUGU | 1125-1147 |
| 1565568.1 | 2894200.1 | | AGGCUGA | | 2894201.1 | | CUCGGUAUU | |
| AD- | A- | 1556 | UACCGAGACAGUGA | 1127-1147 | A- | 2000 | UCAGCCTUCACTGU | 1125-1147 |
| 1565569.1 | 2894202.1 | | AGGCUGA | | 2894203.1 | | CUCGGUAUU | |
| AD- | A- | 1557 | ACAGUGAAGGCUGA | 1134-1154 | A- | 2001 | UUCCTUCUCAGCCU | 1132-1154 |
| 1565749.1 | 2894204.1 | | GAAGGAA | | 2894517.1 | | UCACUGUCU | |
| AD- | A- | 1558 | ACAGUGAAGGCUGA | 1134-1154 | A- | 2002 | UUCCUTCUCAGCCU | 1132-1154 |
| 1565570.1 | 2894204.1 | | GAAGGAA | | 2894205.1 | | UCACUGUCU | |
| AD- | A- | 1559 | ACAGUGAAGGCUGA | 1134-1154 | A- | 2003 | UUCCUTCTCAGCCU | 1132-1154 |
| 1565571.1 | 2894204.1 | | GAAGGAA | | 2894206.1 | | UCACUGUCU | |
| AD- | A- | 1560 | UGAGAAGGAAAUCC | 1145-1165 | A- | 2004 | UCUCCAGGGAUUUC | 1143-1165 |
| 1565750.1 | 2894518.1 | | CUGGAGA | | 2894519.1 | | CUUCUCAGC | |
| AD- | A- | 1561 | GCCAAAGGUGCCAU | 1266-1286 | A- | 2005 | UAGGACAAUGGCAC | 1264-1286 |
| 1565573.1 | 2894209.1 | | UGUCCUA | | 2894210.1 | | CUUUGGCCU | |
| AD- | A- | 1562 | CCAAACUGAACCCAG | 1288-1308 | A- | 2006 | UAUUCUCUGGGUU | 1286-1308 |
| 1565751.1 | 2894211.1 | | AGAAUA | | 2894520.1 | | CAGUUUGGAG | |
| AD- | A- | 1563 | CCAAACUGAACCCAG | 1288-1308 | A- | 2007 | UAUTCTCUGGGUUC | 1286-1308 |
| 1565574.1 | 2894211.1 | | AGAAUA | | 2894212.1 | | AGUUUGGAG | |
| AD- | A- | 1564 | CCAAACUGAACCCAG | 1288-1308 | A- | 2008 | UAUUCTCTGGGUUC | 1286-1308 |
| 1565575.1 | 2894211.1 | | AGAAUA | | 2894213.1 | | AGUUUGGAG | |
| AD- | A- | 1565 | CAAACUGAACCCAGA | 1289-1309 | A- | 2009 | UGAUTCTCUGGGUU | 1287-1309 |
| 1565576.1 | 2894214.1 | | GAAUCA | | 2894215.1 | | CAGUUUGGA | |
| AD- | A- | 1566 | UCCGUAAGCAGUCA | 1339-1359 | A- | 2010 | UGGCGACUGACUGC | 1337-1359 |
| 1565752.1 | 2894216.1 | | GUCGCCA | | 2894521.1 | | UUACGGAUG | |
| AD- | A- | 1567 | UCCGUAAGCAGUCA | 1339-1359 | A- | 2011 | UGGCGACUGACUGC | 1337-1359 |
| 1565577.1 | 2894216.1 | | GUCGCCA | | 2894217.1 | | UUACGGAUG | |
| AD- | A- | 1568 | UCCGUAAGCAGUCA | 1339-1359 | A- | 2012 | UGGCGACTGACUGC | 1337-1359 |
| 1565578.1 | 2894216.1 | | GUCGCCA | | 2894218.1 | | UUACGGAUG | |
| AD- | A- | 1569 | UCCGUAAGCAGUCA | 1339-1359 | A- | 2013 | UGGCGACUGACTGC | 1337-1359 |
| 1565579.1 | 2894219.1 | | GUCGCCA | | 2894220.1 | | UUACGGAUG | |
| AD- | A- | 1570 | UAAGCAGUCAGUCG | 1343-1363 | A- | 2014 | UCAUTGGCGACUGA | 1341-1363 |
| 1565753.1 | 2894522.1 | | CCAAUGA | | 2894523.1 | | CUGCUUACG | |
| AD- | A- | 1571 | CAGUCAGUCGCCAAU | 1347-1367 | A- | 2015 | UAAGGCAUUGGCG | 1345-1367 |
| 1565580.1 | 2894221.1 | | GCCUUA | | 2894222.1 | | ACUGACUGCU | |
| AD- | A- | 1572 | UCAGUCGCCAAUGCC | 1350-1370 | A- | 2016 | UAUGAAGGCAUUG | 1348-1370 |
| 1565754.1 | 2894524.1 | | UUCAUA | | 2894525.1 | | GCGACUGACU | |
| AD- | A- | 1573 | AGUCGCCAAUGCCUU | 1352-1372 | A- | 2017 | UUGATGAAGGCAUU | 1350-1372 |
| 1565581.1 | 2894223.1 | | CAUCAA | | 2894224.1 | | GGCGACUGA | |
| AD- | A- | 1574 | GCCAAUGCCUUCAUC | 1356-1376 | A- | 2018 | UCAGAUGAUGAAG | 1354-1376 |
| 1565582.1 | 2894225.1 | | AUCUGA | | 2894226.1 | | GCAUUGGCGA | |
| AD- | A- | 1575 | CCUUCAUCAUCUGU | 1363-1383 | A- | 2019 | UGGUGCCACAGAUG | 1361-1383 |
| 1565755.1 | 2894227.1 | | GGCACCA | | 2894526.1 | | AUGAAGGCA | |
| AD- | A- | 1576 | CCUUCAUCAUCUGU | 1363-1383 | A- | 2020 | UGGUGCCACAGAUG | 1361-1383 |
| 1565583.1 | 2894227.1 | | GGCACCA | | 2894228.1 | | AUGAAGGCA | |
| AD- | A- | 1577 | CUGUGGCACCUUGU | 1373-1393 | A- | 2021 | UCGGTGTACAAGGU | 1371-1393 |
| 1565584.1 | 2894229.1 | | ACACCGA | | 2894230.1 | | GCCACAGAU | |
| AD- | A- | 1578 | CUACCGUCAACUUUG | 1417-1437 | A- | 2022 | UAUAAGCAAAGUU | 1415-1437 |
| 1565756.1 | 2894231.1 | | CUUAUA | | 2894527.1 | | GACGGUAGCA | |
| AD- | A- | 1579 | CUACCGUCAACUUUG | 1417-1437 | A- | 2023 | UAUAAGCAAAGUU | 1415-1437 |
| 1565585.1 | 2894231.1 | | CUUAUA | | 2894232.1 | | GACGGUAGCA | |
| AD- | A- | 1580 | UACCGUCAACUUUGC | 1418-1438 | A- | 2024 | UCAUAAGCAAAGUU | 1416-1438 |
| 1073420.3 | 1991728.1 | | UUAUGA | | 1806295.1 | | GACGGUAGC | |
| AD- | A- | 1581 | UACCGUCAACUUUGC | 1418-1438 | A- | 2025 | UCAUAAGCAAAGUU | 1416-1438 |
| 1244366.3 | 1991728.1 | | UUAUGA | | 1803954.1 | | GACGGUAGC | |
| AD- | A- | 1582 | UACCGUCAACUUUGC | 1418-1438 | A- | 2026 | UCAUAAGCAAAGUU | 1416-1438 |
| 1565757.1 | 1991728.1 | | UUAUGA | | 2894528.1 | | GACGGUAGC | |
| AD- | A- | 1583 | UACCGUCAACUUUGC | 1418-1438 | A- | 2027 | UCATAAGCAAAGUU | 1416-1438 |
| 1565821.1 | 1991728.1 | | UUAUGA | | 2894627.1 | | GACGGUAGC | |
| AD- | A- | 1584 | UACCGUCAACUUUGC | 1418-1438 | A- | 2028 | UCAUAAGCAAAGUU | 1416-1438 |
| 1565822.1 | 1991728.1 | | UUAUGA | | 2894628.1 | | GACGGUAGC | |
| AD- | A- | 1585 | UACCCUCAACUUUGC | 1418-1438 | A- | 2029 | UCAUAAGCAAAGUU | 1416-1438 |
| 1565824.1 | 2894631.1 | | UUAUGA | | 2894632.1 | | GAGGGUAGC | |
| AD- | A- | 1586 | UACGGUCAACUUUG | 1418-1438 | A- | 2030 | UCAUAAGCAAAGUU | 1416-1438 |
| 1565825.1 | 2894633.1 | | CUUAUGA | | 2894634.1 | | GACCGUAGC | |
| AD- | A- | 1587 | UAGCGUCAACUUUG | 1418-1438 | A- | 2031 | UCAUAAGCAAAGUU | 1416-1438 |
| 1565826.1 | 2894635.1 | | CUUAUGA | | 2894636.1 | | GACGCUAGC | |
| AD- | A- | 1588 | UACCGUCAACUUUGC | 1418-1438 | A- | 2032 | UCAUAAGCAAAGUU | 1416-1438 |
| 1565757.2 | 1991728.1 | | UUAUGA | | 2894528.1 | | GACGGUAGC | |
| AD- | A- | 1589 | UACCGUCAACUUUGC | 1418-1438 | A- | 2033 | UCAUAAGCAAAGUU | 1416-1438 |
| 1565586.1 | 2894233.1 | | UUAUGA | | 2894234.1 | | GACGGUAGC | |
| AD- | A- | 1590 | ACCGUCAACUUUGCU | 1419-1439 | A- | 2034 | UUCATAAGCAAAGU | 1417-1439 |
| 1565587.1 | 2324727.1 | | UAUGAA | | 2894235.1 | | UGACGGUAG | |
| AD- | A- | 1591 | ACCGUCAACUUUGCU | 1419-1439 | A- | 2035 | UTCATAAGCAAAGU | 1417-1439 |
| 1565588.1 | 2894236.1 | | UAUGAA | | 2894237.1 | | UGACGGUAG | |
| AD- | A- | 1592 | CCGUCAACUUUGCU | 1420-1438 | A- | 2036 | UCAUAAGCAAAGUU | 1418-1438 |
| 1565823.1 | 2894629.1 | | UAUGA | | 2894630.1 | | GACGGUG | |
| AD- | A- | 1593 | CCGUCAACUUUGCU | 1420-1440 | A- | 2037 | UGUCAUAAGCAAAG | 1418-1440 |
| 1565589.1 | 2894238.1 | | UAUGACA | | 2894239.1 | | UUGACGGUA | |
| AD- | A- | 1594 | CGUCAACUUUGCUU | 1421-1441 | A- | 2038 | UUGUCATAAGCAAA | 1419-1441 |
| 1565590.1 | 2894240.1 | | AUGACAA | | 2894241.1 | | GUUGACGGU | |
| AD- | A- | 1595 | GUCAACUUUGCUUA | 1422-1442 | A- | 2039 | UGUGTCAUAAGCAA | 1420-1442 |
| 1565591.1 | 2894242.1 | | UGACACA | | 2894243.1 | | AGUUGACGG | |
| AD- | A- | 1596 | UCAACUUUGCUUAU | 1423-1443 | A- | 2040 | UUGUGUCAUAAGC | 1421-1443 |
| 1565758.1 | 2894244.1 | | GACACAA | | 2894529.1 | | AAAGUUGACG | |
| AD- | A- | 1597 | UCAACUUUGCUUAU | 1423-1443 | A- | 2041 | UUGTGTCAUAAGCA | 1421-1443 |
| 1565592.1 | 2894244.1 | | GACACAA | | 2894245.1 | | AAGUUGACG | |
| AD- | A- | 1598 | CAACUUUGCUUAUG | 1424-1444 | A- | 2042 | UCUGTGTCAUAAGC | 1422-1444 |
| 1565594.1 | 2894247.1 | | ACACAGA | | 2894248.1 | | AAAGUUGAC | |
| AD- | A- | 1599 | AACUUUGCUUAUGA | 1425-1445 | A- | 2043 | UCCUGUGUCAUAA | 1423-1445 |
| 1565759.1 | 2894530.1 | | CACAGGA | | 2894531.1 | | GCAAAGUUGA | |
| AD- | A- | 1600 | ACUUUGCUUAUGAC | 1426-1446 | A- | 2044 | UGCCTGTGUCAUAA | 1424-1446 |
| 1565595.1 | 2894249.1 | | ACAGGCA | | 2894250.1 | | GCAAAGUUG | |
| AD- | A- | 1601 | CUUUGCUUAUGACA | 1427-1447 | A- | 2045 | UUGCCUGUGUCAU | 1425-1447 |
| 1565760.1 | 2894532.1 | | CAGGCAA | | 2894533.1 | | AAGCAAAGUU | |
| AD- | A- | 1602 | ACAGGCACAGGUAUC | 1440-1460 | A- | 2046 | UUUGCUGAUACCU | 1438-1460 |
| 1565761.1 | 2894534.1 | | AGCAAA | | 2894535.1 | | GUGCCUGUGU | |
| AD- | A- | 1603 | AUAAGUACAGCAGCA | 1489-1509 | A- | 2047 | UAAUCATGCUGCUG | 1487-1509 |
| 1565596.1 | 2894251.1 | | UGAUUA | | 2894252.1 | | UACUUAUAG | |
| AD- | A- | 1604 | UAAGUACAGCAGCA | 1490-1510 | A- | 2048 | UCAATCAUGCUGCU | 1488-1510 |
| 1565597.1 | 2894253.1 | | UGAUUGA | | 2894254.1 | | GUACUUAUA | |
| AD- | A- | 1605 | AAGUACAGCAGCAU | 1491-1511 | A- | 2049 | UUCAAUCAUGCUGC | 1489-1511 |
| 1565762.1 | 2894255.1 | | GAUUGAA | | 2894536.1 | | UGUACUUAU | |
| AD- | A- | 1606 | AAGUACAGCAGCAU | 1491-1511 | A- | 2050 | UUCAATCAUGCUGC | 1489-1511 |
| 1565598.1 | 2894255.1 | | GAUUGAA | | 2894256.1 | | UGUACUUAU | |
| AD- | A- | 1607 | AAGUACAGCAGCAU | 1491-1511 | A- | 2051 | UUCAATCAUGCUGC | 1489-1511 |
| 1565599.1 | 2894255.1 | | GAUUGAA | | 2894257.1 | | UGUACUUAU | |
| AD- | A- | 1608 | AGUACAGCAGCAUG | 1492-1512 | A- | 2052 | UGUCAATCAUGCUG | 1490-1512 |
| 1565600.1 | 2894258.1 | | AUUGACA | | 2894259.1 | | CUGUACUUA | |
| AD- | A- | 1609 | AGUACAGCAGCAUG | 1492-1512 | A- | 2053 | UGUCAATCAUGCUG | 1490-1512 |
| 1565601.1 | 2894260.1 | | AUUGACA | | 2894261.1 | | CUGUACUUA | |
| AD- | A- | 1610 | GUACAGCAGCAUGA | 1493-1513 | A- | 2054 | UAGUCAAUCAUGCU | 1491-1513 |
| 1565602.1 | 2894262.1 | | UUGACUA | | 2894263.1 | | GCUGUACUU | |
| AD- | A- | 1611 | GUACAGCAGCAUGA | 1493-1513 | A- | 2055 | UAGUCAAUCAUGCU | 1491-1513 |
| 1565827.1 | 2894637.1 | | UUGACUA | | 1804098.1 | | GCUGUACUU | |
| AD- | A- | 1612 | GUACAGCAGCAUGA | 1493-1513 | A- | 2056 | UAGUCAAUCAUGCU | 1491-1513 |
| 1565828.1 | 2894262.1 | | UUGACUA | | 2894638.1 | | GCUGUACUU | |
| AD- | A- | 1613 | GUACAGCAGCAUGA | 1493-1513 | A- | 2057 | UAGUCAAUCAUGCU | 1491-1513 |
| 1565829.1 | 2894262.1 | | UUGACUA | | 2894639.1 | | GCUGUACUU | |
| AD- | A- | 1614 | GUACAGCAGCAUGA | 1493-1513 | A- | 2058 | UAGUCAAUCAUGCU | 1491-1513 |
| 1565830.1 | 2894262.1 | | UUGACUA | | 2894640.1 | | GCUGUACUU | |
| AD- | A- | 1615 | GUACAGCAGCAUGA | 1493-1513 | A- | 2059 | UAGUCAAUCAUGCU | 1491-1513 |
| 1565831.1 | 2894262.1 | | UUGACUA | | 2894641.1 | | GCUGUACUU | |
| AD- | A- | 1616 | GUACUGCAGCAUGA | 1493-1513 | A- | 2060 | UAGUCAAUCAUGCU | 1491-1513 |
| 1565833.1 | 2894644.1 | | UUGACUA | | 2894645.1 | | GCAGUACUU | |
| AD- | A- | 1617 | GUAGAGCAGCAUGA | 1493-1513 | A- | 2061 | UAGUCAAUCAUGCU | 1491-1513 |
| 1565834.1 | 2894646.1 | | UUGACUA | | 2894647.1 | | GCUCUACUU | |
| AD- | A- | 1618 | GUUCAGCAGCAUGA | 1493-1513 | A- | 2062 | UAGUCAAUCAUGCU | 1491-1513 |
| 1565835.1 | 2894648.1 | | UUGACUA | | 2894649.1 | | GCUGAACUU | |
| AD- | A- | 1619 | GUACAGCAGCAUGA | 1493-1513 | A- | 2063 | UAGUCAAUCAUGCU | 1491-1513 |
| 1565602.2 | 2894262.1 | | UUGACUA | | 2894263.1 | | GCUGUACUU | |
| AD- | A- | 1620 | UACAGCAGCAUGAU | 1494-1514 | A- | 2064 | UUAGTCAAUCAUGC | 1492-1514 |
| 1565603.1 | 2894264.1 | | UGACUAA | | 2894265.1 | | UGCUGUACU | |
| AD- | A- | 1621 | ACAGCAGCAUGAUU | 1495-1513 | A- | 2065 | UAGUCAAUCAUGCU | 1493-1513 |
| 1565832.1 | 2894642.1 | | GACUA | | 2894643.1 | | GCUGUGC | |
| AD- | A- | 1622 | ACAGCAGCAUGAUU | 1495-1515 | A- | 2066 | UGUAGUCAAUCAU | 1493-1515 |
| 1565763.1 | 2894266.1 | | GACUACA | | 2894537.1 | | GCUGCUGUAC | |
| AD- | A- | 1623 | ACAGCAGCAUGAUU | 1495-1515 | A- | 2067 | UGUAGTCAAUCAUG | 1493-1515 |
| 1565604.1 | 2894266.1 | | GACUACA | | 2894267.1 | | CUGCUGUAC | |
| AD- | A- | 1624 | ACAGCAGCAUGAUU | 1495-1515 | A- | 2068 | UGUAGTCAAUCAUG | 1493-1515 |
| 1565605.1 | 2894266.1 | | GACUACA | | 2894268.1 | | CUGCUGUAC | |
| AD- | A- | 1625 | CAGCAGCAUGAUUG | 1496-1516 | A- | 2069 | UUGUAGTCAAUCAU | 1494-1516 |
| 1565606.1 | 2894269.1 | | ACUACAA | | 2894270.1 | | GCUGCUGUA | |
| AD- | A- | 1626 | AGCAGCAUGAUUGA | 1497-1517 | A- | 2070 | UUUGTAGUCAAUCA | 1495-1517 |
| 1565764.1 | 2894538.1 | | CUACAAA | | 2894539.1 | | UGCUGCUGU | |
| AD- | A- | 1627 | GCAGCAUGAUUGAC | 1498-1518 | A- | 2071 | UGUUGUAGUCAAU | 1496-1518 |
| 1565607.1 | 2894271.1 | | UACAACA | | 2894272.1 | | CAUGCUGCUG | |
| AD- | A- | 1628 | CAGCAUGAUUGACU | 1499-1519 | A- | 2072 | UGGUTGTAGUCAAU | 1497-1519 |
| 1565608.1 | 2894273.1 | | ACAACCA | | 2894274.1 | | CAUGCUGCU | |
| AD- | A- | 1629 | GCAUGAUUGACUAC | 1501-1521 | A- | 2073 | UGGGGUTGUAGUC | 1499-1521 |
| 1565609.1 | 2894275.1 | | AACCCCA | | 2894276.1 | | AAUCAUGCUG | |
| AD- | A- | 1630 | AGCUCUUUGCCUGG | 1531-1551 | A- | 2074 | UGUUGUCCCAGGCA | 1529-1551 |
| 1565766.1 | 2894279.1 | | GACAACA | | 2894542.1 | | AAGAGCUUC | |
| AD- | A- | 1631 | AGCUCUUUGCCUGG | 1531-1551 | A- | 2075 | UGUTGTCCCAGGCA | 1529-1551 |
| 1565611.1 | 2894279.1 | | GACAACA | | 2894280.1 | | AAGAGCUUC | |
| AD- | A- | 1632 | GCCUGGGACAACUU | 1539-1559 | A- | 2076 | UAUGTUCAAGUUG | 1537-1559 |
| 1565767.1 | 2894281.1 | | GAACAUA | | 2894543.1 | | UCCCAGGCAA | |
| AD- | A- | 1633 | GCCUGGGACAACUU | 1539-1559 | A- | 2077 | UAUGUTCAAGUUG | 1537-1559 |
| 1565612.1 | 2894281.1 | | GAACAUA | | 2894282.1 | | UCCCAGGCAA | |
| AD- | A- | 1634 | GCCUGGGACAACUU | 1539-1559 | A- | 2078 | UAUGUTCAAGUUG | 1537-1559 |
| 1565613.1 | 2894281.1 | | GAACAUA | | 2894283.1 | | UCCCAGGCAA | |
| AD- | A- | 1635 | CUGGGACAACUUGA | 1541-1561 | A- | 2079 | UCCATGTUCAAGUU | 1539-1561 |
| 1565614.1 | 2894284.1 | | ACAUGGA | | 2894285.1 | | GUCCCAGGC | |
| AD- | A- | 1636 | UGGGACAACUUGAA | 1542-1562 | A- | 2080 | UACCAUGUUCAAGU | 1540-1562 |
| 1565768.1 | 2894544.1 | | CAUGGUA | | 2894545.1 | | UGUCCCAGG | |
| AD- | A- | 1637 | GGGACAACUUGAAC | 1543-1563 | A- | 2081 | UGACCATGUUCAAG | 1541-1563 |
| 1565615.1 | 2894286.1 | | AUGGUCA | | 2894287.1 | | UUGUCCCAG | |
| AD- | A- | 1638 | GGGACAACUUGAAC | 1543-1563 | A- | 2082 | UGACCATGUUCAAG | 1541-1563 |
| 1565616.1 | 2894288.1 | | AUGGUCA | | 2894289.1 | | UUGUCCCAG | |
| AD- | A- | 1639 | GGACAACUUGAACA | 1544-1564 | A- | 2083 | UUGACCAUGUUCAA | 1542-1564 |
| 1565617.1 | 2894290.1 | | UGGUCAA | | 2894291.1 | | GUUGUCCCA | |
| AD- | A- | 1640 | GACAACUUGAACAU | 1545-1565 | A- | 2084 | UGUGACCAUGUUC | 1543-1565 |
| 1565769.1 | 2894292.1 | | GGUCACA | | 2894546.1 | | AAGUUGUCCC | |
| AD- | A- | 1641 | GACAACUUGAACAU | 1545-1565 | A- | 2085 | UGUGACCAUGUUC | 1543-1565 |
| 1565618.1 | 2894292.1 | | GGUCACA | | 2894293.1 | | AAGUUGUCCC | |
| AD- | A- | 1642 | ACAACUUGAACAUG | 1546-1566 | A- | 2086 | UAGUGACCAUGUU | 1544-1566 |
| 1565770.1 | 2894294.1 | | GUCACUA | | 2894547.1 | | CAAGUUGUCC | |
| AD- | A- | 1643 | ACAACUUGAACAUG | 1546-1566 | A- | 2087 | UAGTGACCAUGUUC | 1544-1566 |
| 1565619.1 | 2894294.1 | | GUCACUA | | 2894295.1 | | AAGUUGUCC | |
| AD- | A- | 1644 | CAACUUGAACAUGG | 1547-1567 | A- | 2088 | UAAGTGACCAUGUU | 1545-1567 |
| 1565620.1 | 2894296.1 | | UCACUUA | | 2894297.1 | | CAAGUUGUC | |
| AD- | A- | 1645 | AACUUGAACAUGGU | 1548-1568 | A- | 2089 | UUAAGUGACCAUG | 1546-1568 |
| 1565771.1 | 2894548.1 | | CACUUAA | | 2894549.1 | | UUCAAGUUGU | |
| AD- | A- | 1646 | ACUUGAACAUGGUC | 1549-1569 | A- | 2090 | UAUAAGTGACCAUG | 1547-1569 |
| 1565621.1 | 1577540.1 | | ACUUAUA | | 2894298.1 | | UUCAAGUUG | |
| AD- | A- | 1647 | CUUGAACAUGGUCA | 1550-1570 | Å- | 2091 | UCAUAAGUGACCAU | 1548-1570 |
| 1565772.1 | 1577508.1 | | CUUAUGA | | 2894550.1 | | GUUCAAGUU | |
| AD- | A- | 1648 | CUUGAACAUGGUCA | 1550-1570 | A- | 2092 | UCAUAAGUGACCAU | 1548-1570 |
| 1565836.1 | 1577508.1 | | CUUAUGA | | 2894300.1 | | GUUCAAGUU | |
| AD- | A- | 1649 | CUUGAACAUGGUCA | 1550-1570 | A- | 2093 | UCATAAGUGACCAU | 1548-1570 |
| 1565837.1 | 1577508.1 | | CUUAUGA | | 2894650.1 | | GUUCAAGUU | |
| AD- | A- | 1650 | CUUGAACAUGGUCA | 1550-1570 | A- | 2094 | UCAUAAGUGACCAU | 1548-1570 |
| 1565838.1 | 1577508.1 | | CUUAUGA | | 2894651.1 | | GUUCAAGUU | |
| AD- | A- | 1651 | CUUGUACAUGGUCA | 1550-1570 | A- | 2095 | UCAUAAGUGACCAU | 1548-1570 |
| 1565840.1 | 2894654.1 | | CUUAUGA | | 2894655.1 | | GUACAAGUU | |
| AD- | A- | 1652 | CUUCAACAUGGUCAC | 1550-1570 | A- | 2096 | UCAUAAGUGACCAU | 1548-1570 |
| 1565841.1 | 2894656.1 | | UUAUGA | | 2894657.1 | | GUUGAAGUU | |
| AD- | A- | 1653 | CUAGAACAUGGUCAC | 1550-1570 | A- | 2097 | UCAUAAGUGACCAU | 1548-1570 |
| 1565842.1 | 2894658.1 | | UUAUGA | | 2894659.1 | | GUUCUAGUU | |
| AD- | A- | 1654 | CUUGAACAUGGUCA | 1550-1570 | A- | 2098 | UCAUAAGUGACCAU | 1548-1570 |
| 822899.17 | 1577508.1 | | CUUAUGA | | 1577509.1 | | GUUCAAGUU | |
| AD- | A- | 1655 | CUUGAACAUGGUCA | 1550-1570 | A- | 2099 | UCAUAAGUGACCAU | 1548-1570 |
| 1565772.2 | 1577508.1 | | CUUAUGA | | 2894550.1 | | GUUCAAGUU | |
| AD- | A- | 1656 | CUUGAACAUGGUCA | 1550-1570 | A- | 2100 | UCAUAAGUGACCAU | 1548-1570 |
| 1565622.1 | 2894299.1 | | CUUAUGA | | 2894300.1 | | GUUCAAGUU | |
| AD- | A- | 1657 | UUGAACAUGGUCAC | 1551-1571 | A- | 2101 | UUCATAAGUGACCA | 1549-1571 |
| 1565843.1 | 1577562.1 | | UUAUGAA | | 2894660.1 | | UGUUCAAGU | |
| AD- | A- | 1658 | UUGAACAUGGUCAC | 1551-1571 | A- | 2102 | UUCATAAGUGACCA | 1549-1571 |
| 1565844.1 | 1577562.1 | | UUAUGAA | | 2894661.1 | | UGUUCAAGU | |
| AD- | A- | 1659 | UUGAACAUGGUCAC | 1551-1571 | A- | 2103 | UTCATAAGUGACCA | 1549-1571 |
| 1565845.1 | 1577562.1 | | UUAUGAA | | 2894662.1 | | UGUUCAAGU | |
| AD- | A- | 1660 | UUGAACAUGGUCAC | 1551-1571 | A- | 2104 | UTCATAAGUGACCA | 1549-1571 |
| 1565846.1 | 2894663.1 | | UUAUGAA | | 2894662.1 | | UGUUCAAGU | |
| AD- | A- | 1661 | UUGAUCAUGGUCAC | 1551-1571 | A- | 2105 | UUCATAAGUGACCA | 1549-1571 |
| 1565848.1 | 2894666.1 | | UUAUGAA | | 2894667.1 | | UGAUCAAGU | |
| AD- | A- | 1662 | UUGUACAUGGUCAC | 1551-1571 | A- | 2106 | UUCATAAGUGACCA | 1549-1571 |
| 1565849.1 | 2894668.1 | | UUAUGAA | | 2894669.1 | | UGUACAAGU | |
| AD- | A- | 1663 | UUCAACAUGGUCAC | 1551-1571 | A- | 2107 | UUCATAAGUGACCA | 1549-1571 |
| 1565850.1 | 2894670.1 | | UUAUGAA | | 2894671.1 | | UGUUGAAGU | |
| AD- | A- | 1664 | UUGAACAUGGUCAC | 1551-1571 | A- | 2108 | UUCAUAAGUGACCA | 1549-1571 |
| 822926.4 | 1577562.1 | | UUAUGAA | | 1577563.1 | | UGUUCAAGU | |
| AD- | A- | 1665 | UUGAACAUGGUCAC | 1551-1571 | A- | 2109 | UTCATAAGUGACCA | 1549-1571 |
| 1565623.1 | 2894301.1 | | UUAUGAA | | 2894302.1 | | UGUUCAAGU | |
| AD- | A- | 1666 | UGAACAUGGUCACU | 1552-1570 | A- | 2110 | UCAUAAGUGACCAU | 1550-1570 |
| 1565839.1 | 2894652.1 | | UAUGA | | 2894653.1 | | GUUCAGG | |
| AD- | A- | 1667 | UGAACAUGGUCACU | 1552-1572 | A- | 2111 | UGUCAUAAGUGACC | 1550-1572 |
| 1565624.1 | 2894303.1 | | UAUGACA | | 2894304.1 | | AUGUUCAAG | |
| AD- | A- | 1668 | GAACAUGGUCACUU | 1553-1571 | A- | 2112 | UUCATAAGUGACCA | 1551-1571 |
| 1565847.1 | 2894664.1 | | AUGAA | | 2894665.1 | | UGUUCGG | |
| AD- | A- | 1669 | GAACAUGGUCACUU | 1553-1573 | A- | 2113 | UUGUCATAAGUGAC | 1551-1573 |
| 1565625.1 | 2894305.1 | | AUGACAA | | 2894306.1 | | CAUGUUCAA | |
| AD- | A- | 1670 | AACAUGGUCACUUA | 1554-1574 | A- | 2114 | UAUGTCAUAAGUGA | 1552-1574 |
| 1565626.1 | 2894307.1 | | UGACAUA | | 2894308.1 | | CCAUGUUCA | |
| AD- | A- | 1671 | ACAUGGUCACUUAU | 1555-1575 | A- | 2115 | UGAUGUCAUAAGU | 1553-1575 |
| 1565773.1 | 2894309.1 | | GACAUCA | | 2894551.1 | | GACCAUGUUC | |
| AD- | A- | 1672 | ACAUGGUCACUUAU | 1555-1575 | A- | 2116 | UGATGTCAUAAGUG | 1553-1575 |
| 1565627.1 | 2894309.1 | | GACAUCA | | 2894310.1 | | ACCAUGUUC | |
| AD- | A- | 1673 | ACAUGGUCACUUAU | 1555-1575 | A- | 2117 | UGAUGTCAUAAGUG | 1553-1575 |
| 1565628.1 | 2894309.1 | | GACAUCA | | 2894311.1 | | ACCAUGUUC | |
| AD- | A- | 1674 | CAUGGUCACUUAUG | 1556-1576 | A- | 2118 | UUGATGTCAUAAGU | 1554-1576 |
| 1565629.1 | 2894312.1 | | ACAUCAA | | 2894313.1 | | GACCAUGUU | |
| AD- | A- | 1675 | AUGGUCACUUAUGA | 1557-1577 | A- | 2119 | UUUGAUGUCAUAA | 1555-1577 |
| 1565774.1 | 2894552.1 | | CAUCAAA | | 2894553.1 | | GUGACCAUGU | |
| AD- | A- | 1676 | UGGUCACUUAUGAC | 1558-1578 | A- | 2120 | UCUUGATGUCAUAA | 1556-1578 |
| 1565630.1 | 2894314.1 | | AUCAAGA | | 2894315.1 | | GUGACCAUG | |
| AD- | A- | 1677 | GGUCACUUAUGACA | 1559-1579 | A- | 2121 | UGCUTGAUGUCAUA | 1557-1579 |
| 1565631.1 | 2894316.1 | | UCAAGCA | | 2894317.1 | | AGUGACCAU | |
| AD- | A- | 1678 | GUCACUUAUGACAU | 1560-1580 | A- | 2122 | UAGCTUGAUGUCAU | 1558-1580 |
| 1565775.1 | 2894554.1 | | CAAGCUA | | 2894555.1 | | AAGUGACCA | |
| AD- | A- | 1679 | GCAGAAGGAGAUGC | 1619-1639 | A- | 2123 | UCCCTGAGCAUCUC | 1617-1639 |
| 1565632.1 | 2894318.1 | | UCAGGGA | | 2894319.1 | | CUUCUGCCA | |
| AD- | A- | 1680 | AAGGGAGAGCCAGCC | 1659-1679 | A- | 2124 | UUGGCUGGCUGGC | 1657-1679 |
| 1565776.1 | 2894556.1 | | AGCCAA | | 2894557.1 | | UCUCCCUUCA | |
| AD- | A- | 1681 | GAUGAACAUGGUCA | 1727-1747 | A- | 2125 | UAGATGGUGACCAU | 1725-1747 |
| 1565777.1 | 2894558.1 | | CCAUCUA | | 2894559.1 | | GUUCAUCCU | |
| AD- | A- | 1682 | GCAUUUAUGGGAUG | 1816-1836 | A- | 2126 | UAUUAAACAUCCCA | 1814-1836 |
| 1565634.1 | 2894322.1 | | UUUAAUA | | 2894323.1 | | UAAAUGCUG | |
| AD- | A- | 1683 | UGUUUAAUGACAUA | 1828-1848 | A- | 2127 | UUUGAACUAUGUC | 1826-1848 |
| 1565778.1 | 2894324.1 | | GUUCAAA | | 2894560.1 | | AUUAAACAUC | |
| AD- | A- | 1684 | UGUUUAAUGACAUA | 1828-1848 | A- | 2128 | UUUGAACUAUGUC | 1826-1848 |
| 1565635.1 | 2894324.1 | | GUUCAAA | | 2894325.1 | | AUUAAACAUC | |
| AD- | A- | 1685 | UGUUUAAUGACAUA | 1828-1848 | A- | 2129 | UUUGAACTAUGUCA | 1826-1848 |
| 1565636.1 | 2894324.1 | | GUUCAAA | | 2894326.1 | | UUAAACAUC | |
| AD- | A- | 1686 | GUUUAAUGACAUAG | 1829-1849 | A- | 2130 | UCUUGAACUAUGU | 1827-1849 |
| 1565637.1 | 2894327.1 | | UUCAAGA | | 2894328.1 | | CAUUAAACAU | |
| AD- | A- | 1687 | GUUUAAUGACAUAG | 1829-1849 | A- | 2131 | UCUUGAACUAUGU | 1827-1849 |
| 1565638.1 | 2894329.1 | | UUCAAGA | | 2894330.1 | | CAUUAAACAU | |
| AD- | A- | 1688 | UUUAAUGACAUAGU | 1830-1850 | A- | 2132 | UACUTGAACUAUGU | 1828-1850 |
| 1565639.1 | 2894331.1 | | UCAAGUA | | 2894332.1 | | CAUUAAACA | |
| AD- | A- | 1689 | UUAAUGACAUAGUU | 1831-1851 | A- | 2133 | UAACTUGAACUAUG | 1829-1851 |
| 1565779.1 | 2894561.1 | | CAAGUUA | | 2894562.1 | | UCAUUAAAC | |
| AD- | A- | 1690 | UAAUGACAUAGUUC | 1832-1852 | A- | 2134 | UAAACUTGAACUAU | 1830-1852 |
| 1565640.1 | 2894333.1 | | AAGUUUA | | 2894334.1 | | GUCAUUAAA | |
| AD- | A- | 1691 | UAAUGACAUAGUUC | 1832-1852 | A- | 2135 | UAAACUTGAACTAU | 1830-1852 |
| 1565641.1 | 2894335.1 | | AAGUUUA | | 2894336.1 | | GUCAUUAAA | |
| AD- | A- | 1692 | AAUGACAUAGUUCA | 1833-1853 | A- | 2136 | UAAAACTUGAACUA | 1831-1853 |
| 1565642.1 | 2894337.1 | | AGUUUUA | | 2894338.1 | | UGUCAUUAA | |
| AD- | A- | 1693 | AAUGACAUAGUUCA | 1833-1853 | A- | 2137 | UAAAACTUGAACUA | 1831-1853 |
| 1565643.1 | 2894339.1 | | AGUUUUA | | 2894340.1 | | UGUCAUUAA | |
| AD- | A- | 1694 | AUGACAUAGUUCAA | 1834-1854 | A- | 2138 | UGAAAACUUGAACU | 1832-1854 |
| 1565644.1 | 2894341.1 | | GUUUUCA | | 2894342.1 | | AUGUCAUUA | |
| AD- | A- | 1695 | UGACAUAGUUCAAG | 1835-1855 | A- | 2139 | UAGAAAACUUGAAC | 1833-1855 |
| 1565645.1 | 2894343.1 | | UUUUCUA | | 2894344.1 | | UAUGUCAUU | |
| AD- | A- | 1696 | GACAUAGUUCAAGU | 1836-1856 | A- | 2140 | UAAGAAAACUUGAA | 1834-1856 |
| 1565646.1 | 2894345.1 | | UUUCUUA | | 2894346.1 | | CUAUGUCAU | |
| AD- | A- | 1697 | ACAUAGUUCAAGUU | 1837-1857 | A- | 2141 | UCAAGAAAACUUGA | 1835-1857 |
| 1565851.1 | 2894672.1 | | UUCUUGA | | 1806645.1 | | ACUAUGUCA | |
| AD- | A- | 1698 | ACAUAGUUCAAGUU | 1837-1857 | A- | 2142 | UCAAGAAAACUTGA | 1835-1857 |
| 1565852.1 | 2894347.1 | | UUCUUGA | | 2894673.1 | | ACUAUGUCG | |
| AD- | A- | 1699 | ACAUAGUUCAAGUU | 1837-1857 | A- | 2143 | UCAAGAAAACUUGA | 1835-1857 |
| 1565853.1 | 2894347.1 | | UUCUUGA | | 2894674.1 | | ACUAUGUCG | |
| AD- | A- | 1700 | ACAUAGUUCAAGUU | 1837-1857 | A- | 2144 | UCAAGAAAACUTGA | 1835-1857 |
| 1565854.1 | 2894347.1 | | UUCUUGA | | 2894675.1 | | ACUAUGUCG | |
| AD- | A- | 1701 | ACAUUGUUCAAGUU | 1837-1857 | A- | 2145 | UCAAGAAAACUUGA | 1835-1857 |
| 1565857.1 | 2894679.1 | | UUCUUGA | | 2894680.1 | | ACAAUGUCG | |
| AD- | A- | 1702 | ACAAAGUUCAAGUU | 1837-1857 | A- | 2146 | UCAAGAAAACUUGA | 1835-1857 |
| 1565858.1 | 2894681.1 | | UUCUUGA | | 2894682.1 | | ACUUUGUCG | |
| AD- | A- | 1703 | ACUUAGUUCAAGUU | 1837-1857 | A- | 2147 | UCAAGAAAACUUGA | 1835-1857 |
| 1565859.1 | 2894683.1 | | UUCUUGA | | 2894684.1 | | ACUAAGUCG | |
| AD- | A- | 1704 | ACAUAGUUCAAGUU | 1837-1857 | A- | 2148 | UCAAGAAAACUTGA | 1835-1857 |
| 1565647.1 | 2894347.1 | | UUCUUGA | | 2894348.1 | | ACUAUGUCA | |
| AD- | A- | 1705 | CAUAGUUCAAGUUU | 1838-1858 | A- | 2149 | UACAAGAAAACTUG | 1836-1858 |
| 1565648.1 | 2894349.1 | | UCUUGUA | | 2894350.1 | | AACUAUGUC | |
| AD- | A- | 1706 | AUAGUUCAAGUUUU | 1839-1857 | A- | 2150 | UCAAGAAAACUUGA | 1837-1857 |
| 1565855.1 | 2894676.1 | | CUUGA | | 2894677.1 | | ACUAUGU | |
| AD- | A- | 1707 | AUAGUUCAAGUUUU | 1839-1857 | A- | 2151 | UCAAGAAAACUTGA | 1837-1857 |
| 1565856.1 | 2894676.1 | | CUUGA | | 2894678.1 | | ACUAUGU | |
| AD- | A- | 1708 | AUAGUUCAAGUUUU | 1839-1859 | A- | 2152 | UCACAAGAAAACUU | 1837-1859 |
| 1565649.1 | 2894351.1 | | CUUGUGA | | 2894352.1 | | GAACUAUGU | |
| AD- | A- | 1709 | UAGUUCAAGUUUUC | 1840-1860 | A- | 2153 | UUCACAAGAAAACU | 1838-1860 |
| 1565650.1 | 2894353.1 | | UUGUGAA | | 2894354.1 | | UGAACUAUG | |
| AD- | A- | 1710 | UAGUUCAAGUUUUC | 1840-1860 | A- | 2154 | UTCACAAGAAAACU | 1838-1860 |
| 1565651.1 | 2894355.1 | | UUGUGAA | | 2894356.1 | | UGAACUAUG | |
| AD- | A- | 1711 | AGUUCAAGUUUUCU | 1841-1861 | A- | 2155 | UAUCACAAGAAAAC | 1839-1861 |
| 1565652.1 | 2894357.1 | | UGUGAUA | | 2894358.1 | | UUGAACUAU | |
| AD- | A- | 1712 | AGUUCAAGUUUUCU | 1841-1861 | A- | 2156 | UAUCACAAGAAAAC | 1839-1861 |
| 1565653.1 | 2894359.1 | | UGUGAUA | | 2894360.1 | | UUGAACUAU | |
| AD- | A- | 1713 | GUUCAAGUUUUCUU | 1842-1862 | A- | 2157 | UAAUCACAAGAAAA | 1840-1862 |
| 1565780.1 | 2894361.1 | | GUGAUUA | | 2894563.1 | | CUUGAACUA | |
| AD- | A- | 1714 | GUUCAAGUUUUCUU | 1842-1862 | A- | 2158 | UAATCACAAGAAAA | 1840-1862 |
| 1565654.1 | 2894361.1 | | GUGAUUA | | 2894362.1 | | CUUGAACUA | |
| AD- | A- | 1715 | UUCAAGUUUUCUUG | 1843-1863 | A- | 2159 | UAAATCACAAGAAA | 1841-1863 |
| 1565655.1 | 2894363.1 | | UGAUUUA | | 2894364.1 | | ACUUGAACU | |
| AD- | A- | 1716 | UCAAGUUUUCUUGU | 1844-1864 | A- | 2160 | UCAAAUCACAAGAA | 1842-1864 |
| 1565781.1 | 2894365.1 | | GAUUUGA | | 2894564.1 | | AACUUGAAC | |
| AD- | A- | 1717 | UCAAGUUUUCUUGU | 1844-1864 | A- | 2161 | UCAAATCACAAGAA | 1842-1864 |
| 1565656.1 | 2894365.1 | | GAUUUGA | | 2894366.1 | | AACUUGAAC | |
| AD- | A- | 1718 | UCAAGUUUUCUUGU | 1844-1864 | A- | 2162 | UCAAATCACAAGAA | 1842-1864 |
| 1565657.1 | 2894365.1 | | GAUUUGA | | 2894367.1 | | AACUUGAAC | |
| AD- | A- | 1719 | UCAAGUUUUCUUGU | 1844-1864 | A- | 2163 | UCAAAUCACAAGAA | 1842-1864 |
| 1565658.1 | 2894368.1 | | GAUUUGA | | 2894369.1 | | AACUUGAAC | |
| AD- | A- | 1720 | CAAGUUUUCUUGUG | 1845-1865 | A- | 2164 | UCCAAATCACAAGA | 1843-1865 |
| 1565659.1 | 2894370.1 | | AUUUGGA | | 2894371.1 | | AAACUUGAA | |
| AD- | A- | 1721 | AAGUUUUCUUGUGA | 1846-1866 | A- | 2165 | UCCCAAAUCACAAG | 1844-1866 |
| 1565660.1 | 2894372.1 | | UUUGGGA | | 2894373.1 | | AAAACUUGA | |
| AD- | A- | 1722 | UGAAAACCAUUGCUC | 1897-1917 | A- | 2166 | UUGCAAGAGCAAUG | 1895-1917 |
| 1565782.1 | 2894565.1 | | UUGCAA | | 2894566.1 | | GUUUUCAGG | |
| AD- | A- | 1723 | GAAAACCAUUGCUCU | 1898-1918 | A- | 2167 | UAUGCAAGAGCAAU | 1896-1918 |
| 1565661.1 | 2894374.1 | | UGCAUA | | 2894375.1 | | GGUUUUCAG | |
| AD- | A- | 1724 | GAAAACCAUUGCUCU | 1898-1918 | A- | 2168 | UAUGCAAGAGCAAU | 1896-1918 |
| 1565662.1 | 2894376.1 | | UGCAUA | | 2894377.1 | | GGUUUUCAG | |
| AD- | A- | 1725 | AAAACCAUUGCUCUU | 1899-1919 | A- | 2169 | UCAUGCAAGAGCAA | 1897-1919 |
| 1565663.1 | 2894378.1 | | GCAUGA | | 2894379.1 | | UGGUUUUCA | |
| AD- | A- | 1726 | AAAACCAUUGCUCUU | 1899-1919 | A- | 2170 | UCAUGCAAGAGCAA | 1897-1919 |
| 1565664.1 | 2894380.1 | | GCAUGA | | 2894381.1 | | UGGUUUUCA | |
| AD- | A- | 1727 | AAACCAUUGCUCUU | 1900-1920 | A- | 2171 | UACATGCAAGAGCA | 1898-1920 |
| 1565783.1 | 2894382.1 | | GCAUGUA | | 2894567.1 | | AUGGUUUUC | |
| AD- | A- | 1728 | AAACCAUUGCUCUU | 1900-1920 | A- | 2172 | UACAUGCAAGAGCA | 1898-1920 |
| 1565665.1 | 2894382.1 | | GCAUGUA | | 2894383.1 | | AUGGUUUUC | |
| AD- | A- | 1729 | AACCAUUGCUCUUGC | 1901-1921 | A- | 2173 | UAACAUGCAAGAGC | 1899-1921 |
| 1565784.1 | 2894568.1 | | AUGUUA | | 2894569.1 | | AAUGGUUUU | |
| AD- | A- | 1730 | ACCAUUGCUCUUGCA | 1902-1922 | A- | 2174 | UUAACATGCAAGAG | 1900-1922 |
| 1565666.1 | 2894384.1 | | UGUUAA | | 2894385.1 | | CAAUGGUUU | |
| AD- | A- | 1731 | CCAUUGCUCUUGCA | 1903-1923 | A- | 2175 | UGUAACAUGCAAGA | 1901-1923 |
| 1565667.1 | 2894386.1 | | UGUUACA | | 2894387.1 | | GCAAUGGUU | |
| AD- | A- | 1732 | CAUUGCUCUUGCAU | 1904-1924 | A- | 2176 | UUGUAACAUGCAAG | 1902-1924 |
| 1565785.1 | 2894388.1 | | GUUACAA | | 2894570.1 | | AGCAAUGGU | |
| AD- | A- | 1733 | CAUUGCUCUUGCAU | 1904-1924 | A- | 2177 | UUGTAACAUGCAAG | 1902-1924 |
| 1565668.1 | 2894388.1 | | GUUACAA | | 2894389.1 | | AGCAAUGGU | |
| AD- | A- | 1734 | AUUGCUCUUGCAUG | 1905-1925 | A- | 2178 | UAUGTAACAUGCAA | 1903-1925 |
| 1565669.1 | 2894390.1 | | UUACAUA | | 2894391.1 | | GAGCAAUGG | |
| AD- | A- | 1735 | UUGCUCUUGCAUGU | 1906-1926 | A- | 2179 | UCAUGUAACAUGCA | 1904-1926 |
| 1565670.1 | 2894392.1 | | UACAUGA | | 2894393.1 | | AGAGCAAUG | |
| AD- | A- | 1736 | UUGCUCUUGCAUGU | 1906-1926 | A- | 2180 | UCAUGUAACAUGCA | 1904-1926 |
| 1565860.1 | 2894685.1 | | UACAUGA | | 1804746.1 | | AGAGCAAUG | |
| AD- | A- | 1737 | UUGCACUUGCAUGU | 1906-1926 | A- | 2181 | UCAUGUAACAUGCA | 1904-1926 |
| 1565861.1 | 2894686.1 | | UACAUGA | | 2894687.1 | | AGUGCAAUG | |
| AD- | A- | 1738 | UUGGUCUUGCAUGU | 1906-1926 | A- | 2182 | UCAUGUAACAUGCA | 1904-1926 |
| 1565862.1 | 2894688.1 | | UACAUGA | | 2894689.1 | | AGACCAAUG | |
| AD- | A- | 1739 | UUCCUCUUGCAUGU | 1906-1926 | A- | 2183 | UCAUGUAACAUGCA | 1904-1926 |
| 1565863.1 | 2894690.1 | | UACAUGA | | 2894691.1 | | AGAGGAAUG | |
| AD- | A- | 1740 | UUGCUCUUGCAUGU | 1906-1926 | A- | 2184 | UCAUGUAACAUGCA | 1904-1926 |
| 1565864.1 | 2894692.1 | | UACAUGA | | 2894393.1 | | AGAGCAAUG | |
| AD- | A- | 1741 | UUGCUCUUGCAUGU | 1906-1926 | A- | 2185 | UCAUGUAACAUGCA | 1904-1926 |
| 1565866.1 | 2894685.1 | | UACAUGA | | 2894695.1 | | AGAGCAAUG | |
| AD- | A- | 1742 | UUGCUCUUGCAUGU | 1906-1926 | A- | 2186 | UCAUGUAACAUGCA | 1904-1926 |
| 1565670.2 | 2894392.1 | | UACAUGA | | 2894393.1 | | AGAGCAAUG | |
| AD- | A- | 1743 | UGCUCUUGCAUGUU | 1907-1927 | A- | 2187 | UCCATGTAACAUGC | 1905-1927 |
| 1565671.1 | 2894394.1 | | ACAUGGA | | 2894395.1 | | AAGAGCAAU | |
| AD- | A- | 1744 | GCUCUUGCAUGUUA | 1908-1926 | A- | 2188 | UCAUGUAACAUGCA | 1906-1926 |
| 1565865.1 | 2894693.1 | | CAUGA | | 2894694.1 | | AGAGCGG | |
| AD- | A- | 1745 | GCUCUUGCAUGUUA | 1908-1928 | A- | 2189 | UACCAUGUAACAUG | 1906-1928 |
| 1565786.1 | 2894571.1 | | CAUGGUA | | 2894572.1 | | CAAGAGCAA | |
| AD- | A- | 1746 | CUCUUGCAUGUUAC | 1909-1929 | A- | 2190 | UAACCATGUAACAU | 1907-1929 |
| 1565672.1 | 2894396.1 | | AUGGUUA | | 2894397.1 | | GCAAGAGCA | |
| AD- | A- | 1747 | CUCUUGCAUGUUAC | 1909-1929 | A- | 2191 | UAACCATGUAACAU | 1907-1929 |
| 1565673.1 | 2894396.1 | | AUGGUUA | | 2894398.1 | | GCAAGAGCA | |
| AD- | A- | 1748 | UCUUGCAUGUUACA | 1910-1930 | A- | 2192 | UUAACCAUGUAACA | 1908-1930 |
| 1565674.1 | 2894399.1 | | UGGUUAA | | 2894400.1 | | UGCAAGAGC | |
| AD- | A- | 1749 | CUUGCAUGUUACAU | 1911-1931 | A- | 2193 | UGUAACCAUGUAAC | 1909-1931 |
| 1565787.1 | 1577564.1 | | GGUUACA | | 2894573.1 | | AUGCAAGAG | |
| AD- | A- | 1750 | CUUGCAUGUUACAU | 1911-1931 | A- | 2194 | UGUAACCAUGUAAC | 1909-1931 |
| 1565675.1 | 1577564.1 | | GGUUACA | | 2894401.1 | | AUGCAAGAG | |
| AD- | A- | 1751 | UUGCAUGUUACAUG | 1912-1932 | A- | 2195 | UGGUAACCAUGUAA | 1910-1932 |
| 1565788.1 | 1577566.1 | | GUUACCA | | 2894574.1 | | CAUGCAAGA | |
| AD- | A- | 1752 | UUGCAUGUUACAUG | 1912-1932 | A- | 2196 | UGGTAACCAUGUAA | 1910-1932 |
| 1565676.1 | 1577566.1 | | GUUACCA | | 2894402.1 | | CAUGCAAGA | |
| AD- | A- | 1753 | UUGCAUGUUACAUG | 1912-1932 | A- | 2197 | UGGUAACCAUGTAA | 1910-1932 |
| 1565677.1 | 2894403.1 | | GUUACCA | | 2894404.1 | | CAUGCAAGA | |
| AD- | A- | 1754 | UGCAUGUUACAUGG | 1913-1933 | A- | 2198 | UUGGTAACCAUGUA | 1911-1933 |
| 1565678.1 | 2894405.1 | | UUACCAA | | 2894406.1 | | ACAUGCAAG | |
| AD- | A- | 1755 | GCAUGUUACAUGGU | 1914-1934 | A- | 2199 | UGUGGUAACCAUG | 1912-1934 |
| 1565679.1 | 1577580.1 | | UACCACA | | 2894407.1 | | UAACAUGCAA | |
| AD- | A- | 1756 | GCAUGUUACAUGGU | 1914-1934 | A- | 2200 | UGUGGUAACCATGU | 1912-1934 |
| 1565680.1 | 2894408.1 | | UACCACA | | 2894409.1 | | AACAUGCAA | |
| AD- | A- | 1757 | CAUGUUACAUGGUU | 1915-1935 | A- | 2201 | UUGUGGTAACCAUG | 1913-1935 |
| 1565681.1 | 2894410.1 | | ACCACAA | | 2894411.1 | | UAACAUGCA | |
| AD- | A- | 1758 | AUGUUACAUGGUUA | 1916-1936 | A- | 2.202 | UUUGTGGUAACCAU | 1914-1936 |
| 1565789.1 | 2894575.1 | | CCACAAA | | 2894576.1 | | GUAACAUGC | |
| AD- | A- | 1759 | UGUUACAUGGUUAC | 1917-1937 | A- | 2203 | UCUUGUGGUAACC | 1915-1937 |
| 1565790.1 | 2894577.1 | | CACAAGA | | 2894578.1 | | AUGUAACAUG | |
| AD- | A- | 1760 | CUCCUCUGGCCAGCA | 1976-1996 | A- | 2204 | UTUCGATGCUGGCC | 1974-1996 |
| 1565682.1 | 2894412.1 | | UCGAAA | | 2894413.1 | | AGAGGAGCU | |
| AD- | A- | 1761 | AUAUAAGUAAGAUG | 1995-2015 | A- | 2205 | UUAAAUGCAUCUU | 1993-2015 |
| 1565791.1 | 2894579.1 | | CAUUUAA | | 2894580.1 | | ACUUAUAUUC | |
| AD- | A- | 1762 | UAUAAGUAAGAUGC | 1996-2016 | A- | 2206 | UGUAAATGCAUCUU | 1994-2016 |
| 1565683.1 | 2894414.1 | | AUUUACA | | 2894415.1 | | ACUUAUAUU | |
| AD- | A- | 1763 | AUAAGUAAGAUGCA | 1997-2017 | A- | 2207 | UAGUAAAUGCATCU | 1995-2017 |
| 1565684.1 | 2894416.1 | | UUUACUA | | 2894417.1 | | UACUUAUAU | |
| AD- | A- | 1764 | UAAGUAAGAUGCAU | 1998-2018 | A- | 2208 | UTAGTAAAUGCAUC | 1996-2018 |
| 1565685.1 | 2894418.1 | | UUACUAA | | 2894419.1 | | UUACUUAUA | |
| AD- | A- | 1765 | AAGUAAGAUGCAUU | 1999-2019 | A- | 2209 | UGUAGUAAAUGCA | 1997-2019 |
| 1565867.1 | 2894420.1 | | UACUACA | | 1804926.1 | | UCUUACUUAU | |
| AD- | A- | 1766 | AAGUAAGAUGCAUU | 1999-2019 | A- | 2.210 | UGUAGUAAAUGCA | 1997-2019 |
| 1565868.1 | 2894420.1 | | UACUACA | | 2894696.1 | | UCUUACUUGU | |
| AD- | A- | 1767 | AAGUAAGAUGCAUU | 1999-2019 | A- | 2211 | UGUAGUAAAUGCA | 1997-2019 |
| 1565869.1 | 2894420.1 | | UACUACA | | 2894697.1 | | UCUUACUUGU | |
| AD- | A- | 1768 | AAGUAAGAUGCAUU | 1999-2019 | A- | 2212 | UGUAGUAAAUGCA | 1997-2019 |
| 1565870.1 | 2894420.1 | | UACUACA | | 2894698.1 | | UCUUACUUGU | |
| AD- | A- | 1769 | AAGUAAGAUGCAUU | 1999-2019 | A- | 2213 | UGUAGUAAAUGCA | 1997-2019 |
| 1565871.1 | 2894422.1 | | UACUACA | | 2894697.1 | | UCUUACUUGU | |
| AD- | A- | 1770 | AAGUAAGATGCAUU | 1999-2019 | A- | 2214 | UGUAGUAAAUGCA | 1997-2019 |
| 1565872.1 | 2894699.1 | | UACUACA | | 2894700.1 | | UCUUACUUGU | |
| AD- | A- | 1771 | AAGUAAGAUGCAUU | 1999-2019 | A- | 2215 | UGUAGUAAAUGCA | 1997-2019 |
| 1565873.1 | 2894422.1 | | UACUACA | | 2894700.1 | | UCUUACUUGU | |
| AD- | A- | 1772 | AAGUUAGAUGCAUU | 1999-2019 | A- | 2216 | UGUAGUAAAUGCA | 1997-2019 |
| 1565874.1 | 2894701.1 | | UACUACA | | 2894702.1 | | UCUAACUUGU | |
| AD- | A- | 1773 | AAGAAAGAUGCAUU | 1999-2019 | A- | 2217 | UGUAGUAAAUGCA | 1997-2019 |
| 1565875.1 | 2894703.1 | | UACUACA | | 2894704.1 | | UCUUUCUUGU | |
| AD- | A- | 1774 | AACUAAGAUGCAUU | 1999-2019 | A- | 2218 | UGUAGUAAAUGCA | 1997-2019 |
| 1565876.1 | 2894705.1 | | UACUACA | | 2894706.1 | | UCUUAGUUGU | |
| AD- | A- | 1775 | AAGUAAGAUGCAUU | 1999-2019 | A- | 2219 | UGUAGUAAAUGCA | 1997-2019 |
| 1565686.1 | 2894420.1 | | UACUACA | | 2894421.1 | | UCUUACUUAU | |
| AD- | A- | 1776 | AAGUAAGAUGCAUU | 1999-2019 | A- | 2220 | UGUAGUAAAUGCA | 1997-2019 |
| 1565687.1 | 2894422.1 | | UACUACA | | 2894423.1 | | UCUUACUUAU | |
| AD- | A- | 1777 | AGUAAGAUGCAUUU | 2000-2020 | A- | 2221 | UUGUAGTAAAUGCA | 1998-2020 |
| 1565688.1 | 2894424.1 | | ACUACAA | | 2894425.1 | | UCUUACUUA | |
| AD- | A- | 1778 | GUAAGAUGCAUUUA | 2001-2019 | A- | 2222 | UGUAGUAAAUGCA | 1999-2019 |
| 1565877.1 | 2894707.1 | | CUACA | | 2894708.1 | | UCUUACUU | |
| AD- | A- | 1779 | UUGGCUUCUAAUGC | 2021-2041 | A- | 2.223 | UUCUGAAGCAUUA | 2019-2041 |
| 1565689.1 | 2894426.1 | | UUCAGAA | | 2894427.1 | | GAAGCCAACU | |
| AD- | A- | 1780 | CUUCUAAUGCUUCA | 2025-2045 | A- | 2224 | UUCUAUCUGAAGCA | 2023-2045 |
| 1565792.1 | 2894428.1 | | GAUAGAA | | 2894581.1 | | UUAGAAGCC | |
| AD- | A- | 1781 | CUUCUAAUGCUUCA | 2025-2045 | A- | 2225 | UUCTATCUGAAGCA | 2023-2045 |
| 1565690.1 | 2894428.1 | | GAUAGAA | | 2894429.1 | | UUAGAAGCC | |
| AD- | A- | 1782 | CUUCUAAUGCUUCA | 2025-2045 | A- | 2226 | UUCUATCTGAAGCA | 2023-2045 |
| 1565691.1 | 2894428.1 | | GAUAGAA | | 2894430.1 | | UUAGAAGCC | |

### Example 2. In Vitro Screening of MYOC siRNA

### Experimental Methods

### Cell Culture and Transfections:

### Human Trabecular Meshwork Cells (HTMC) Cell Transfections

[0804] HTMC cells (ATCC) were transfected by adding 4.9 μl of Opti-MEM plus 0.1 μl of RNAiMAX per well (Invitrogen, Carlsbad CA. cat #13778-150) to 5 μl of siRNA duplexes per well, with 4 replicates of each siRNA duplex, into a 384-well plate, and incubated at room temperature for 15 minutes. Forty μl of DMEM:F12 Medium (ThermoFisher) containing ˜5×10³ cells were then added to the siRNA-transfection mixture. Cells were incubated for 24 hours prior to RNA purification. Experiments were performed at 10 nM, 1 nM, and 0.1 nM.

Total RNA Isolation Using DYNABEADS mRNA Isolation Kit:

[0805] RNA was isolated using an automated protocol on a BioTek-EL406 platform using DYNABEADs (Invitrogen, cat #61012). Briefly, 70 μl of Lysis/Binding Buffer and 10 μl of lysis buffer containing 3 μl of magnetic beads were added to the plate with cells. Plates were incubated on an electromagnetic shaker for 10 minutes at room temperature and then magnetic beads were captured and the supernatant was removed. Bead-bound RNA was then washed 2 times with 150 μl Wash Buffer A and once with Wash Buffer B. Beads were then washed with 150 μl Elution Buffer, re-captured and supernatant removed.

cDNA Synthesis Using ABI High Capacity cDNA Reverse Transcription Kit (Applied Biosystems, Foster City, CA, Cat #4368813):

[0806] Ten μl of a master mix containing 1 μl 10× Buffer, 0.4 μl 25× dNTPs, 1 μl 10× Random primers, 0.5 μl Reverse Transcriptase, 0.5 μl RNase inhibitor and 6.6 μl of H2O per reaction was added to RNA isolated above. Plates were sealed, mixed, and incubated on an electromagnetic shaker for 10 minutes at room temperature, followed by 2 h 37° C.

### Real Time PCR:

[0807] Two μl of cDNA and 5 μl Lightcycler 480 probe master mix (Roche Cat #04887301001) were added to either 0.5 μl of Human GAPDH TaqMan Probe (4326317E) and 0.5 μl MYOC Human probe per well in a 384 well plates (Roche cat #04887301001). Real time PCR was done in a LightCycler480 Real Time PCR system (Roche). Each duplex was tested at least two times and data were normalized to cells transfected with a non-targeting control siRNA. To calculate relative fold change, real time data were analyzed using the ΔΔCt method and normalized to assays performed with cells transfected with a non-targeting control siRNA.

### Results

[0808] The results of the multi-dose screen in human trabecular meshwork cells (HTMC) with exemplary human MYOC siRNAs are shown in Table 3 (correspond to siRNAs in Table 2A), The multi-dose experiments were performed at 10 nM, 1 nM, and 0.1 nM final duplex concentrations and the data are expressed as percent message remaining relative to non-targeting control.

[0809] Of the exemplary siRNA duplexes evaluated in Table 3 below, 174 achieved a knockdown of MYOC of 2:90%, 347 achieved a knockdown of MYOC of ≥70%, 392 achieved a knockdown of MYOC of ≥50%, 424 achieved a knockdown of MYOC of ≥20%, and 433 achieved a knockdown of MYOC of ≥10% in HTMC cells when administered at the 10 nM concentration.

[0810] Of the exemplary siRNA duplexes evaluated in Table 3 below, 142 achieved a knockdown of MYOC of ≥90%, 341 achieved a knockdown of MYOC of ≥70%, 391 achieved a knockdown of MYOC of ≥50%, 424 achieved a knockdown of MYOC of ≥20%, and 431 achieved a knockdown of MYOC of ≥10% in HTMC cells when administered at the 1 nM concentration.

[0811] Of the exemplary siRNA duplexes evaluated in Table 3 below, 57 achieved a knockdown of MYOC of ≥90%, 277 achieved a knockdown of MYOC of ≥70%, 361 achieved a knockdown of MYOC of ≥50%, 416 achieved a knockdown of MYOC of ≥20%, and 425 achieved a knockdown of MYOC of ≥10% in HTMC cells when administered at the 0.1 nM concentration.

[0812] Of the exemplary siRNA duplexes evaluated in Table 3 below, AD-1565448.1, AD-1193175.5, AD-1565798.1, AD-1565452.1, AD-1565453.1, AD-1565454.1, AD-1565456.1, AD-1565492.1, AD-1565493.1, AD-1565503.1, AD-1073418.5, AD-1565804.1, AD-1565806.1, AD-1244366.3, AD-1565589.1, AD-1565837.1, AD-1565624.1, AD-1565626.1 showed superior knockdown of MYOC in HTMC cells.

TABLE 3
MYOC endogenous in vitro multi-dose screen with one set of exemplary
human MYOC siRNAs (*the number following the decimal point in
a duplex name merely refers to a batch production number)

| | 10 nM | | 1 nM | | 0.1 nM | |
|---|---|---|---|---|---|---|
| | % message | | % message | | % message | |
| Duplex Name* | remaining | St. Dev. | remaining | St. Dev. | remaining | St. Dev. |
| AD-1565444.1 | 13.58 | 1.84 | 14.71 | 7.84 | 26.73 | 7.48 |
| AD-1565445.1 | 10.87 | 6.23 | 13.16 | 4.98 | 25.60 | 5.38 |
| AD-1565692.1 | 16.41 | 2.08 | 18.61 | 0.75 | 25.71 | 4.17 |
| AD-1565446.1 | 14.37 | 7.51 | 6.94 | 1.71 | 14.17 | 3.72 |
| AD-1565447.1 | 10.38 | 3.76 | 10.19 | 3.32 | 23.50 | 6.92 |
| AD-1565448.1 | 9.24 | 5.79 | 4.13 | 2.66 | 5.97 | 2.52 |
| AD-1565693.1 | 3.99 | 1.51 | 6.10 | 1.34 | 12.35 | 2.47 |
| AD-1565449.1 | 7.20 | 2.64 | 3.83 | 1.28 | 7.08 | 3.96 |
| AD-1565450.1 | 8.78 | 4.45 | 6.72 | 1.51 | 12.08 | 2.48 |
| AD-1565694.1 | 4.18 | 2.71 | 9.79 | 5.26 | 8.35 | 1.68 |
| AD-1565695.1 | 7.35 | 3.15 | 6.28 | 1.55 | 9.28 | 3.23 |
| AD-1193175.5 | 2.63 | 0.72 | 2.84 | 1.11 | 9.95 | 4.58 |
| AD-1565793.1 | 5.77 | 0.80 | 2.63 | 0.70 | 9.78 | 3.84 |
| AD-1565795.1 | 3.59 | 2.06 | 6.15 | 1.52 | 8.48 | 3.62 |
| AD-1565796.1 | 1.04 | 0.24 | 3.44 | 1.14 | 5.75 | 1.09 |
| AD-1565797.1 | 2.72 | 0.83 | 3.58 | 2.60 | 8.08 | 3.77 |
| AD-1565798.1 | 3.95 | 2.69 | 2.43 | 1.56 | 3.53 | 1.68 |
| AD-1565799.1 | 4.64 | 3.39 | 3.82 | 0.78 | 4.90 | 2.65 |
| AD-1565451.1 | 5.31 | 1.89 | 4.64 | 1.66 | 10.31 | 5.68 |
| AD-1565452.1 | 6.08 | 2.03 | 7.09 | 1.62 | 7.98 | 5.26 |
| AD-1565696.1 | 5.58 | 2.54 | 9.52 | 3.27 | 8.31 | 3.16 |
| AD-1565794.1 | 6.22 | 1.99 | 4.53 | 2.58 | 6.90 | 3.64 |
| AD-1565453.1 | 6.30 | 1.27 | 8.30 | 1.28 | 10.41 | 6.07 |
| AD-1565454.1 | 19.20 | 4.92 | 6.07 | 1.17 | 9.34 | 1.31 |
| AD-1565455.1 | 16.24 | 3.57 | 6.52 | 3.62 | 13.11 | 3.35 |
| AD-1565456.1 | 10.95 | 4.22 | 4.41 | 1.79 | 9.13 | 3.28 |
| AD-1565457.1 | 16.55 | 3.00 | 5.13 | 2.63 | 13.24 | 6.40 |
| AD-1565697.1 | 6.35 | 1.94 | 9.23 | 3.77 | 10.72 | 0.63 |
| AD-1565698.1 | 5.42 | 2.65 | 12.12 | 1.42 | 6.99 | 1.98 |
| AD-1565458.1 | 11.01 | 3.72 | 4.33 | 2.88 | 11.84 | 3.86 |
| AD-1565459.1 | 42.85 | 5.80 | 36.24 | 26.02 | 45.00 | 15.33 |
| AD-1565699.1 | 8.28 | 2.74 | 10.34 | 4.26 | 18.07 | 7.91 |
| AD-1565700.1 | 7.73 | 4.21 | 11.72 | 4.13 | 9.75 | 1.96 |
| AD-1565460.1 | 8.30 | 1.22 | 8.69 | 2.89 | 12.07 | 3.01 |
| AD-1565461.1 | 14.00 | 3.46 | 5.33 | 2.92 | 16.28 | 3.37 |
| AD-1565462.1 | 21.75 | 3.70 | 20.28 | 2.83 | 31.62 | 4.90 |
| AD-1565701.1 | 8.93 | 5.10 | 9.40 | 3.76 | 13.18 | 1.17 |
| AD-1565463.1 | 71.43 | 19.78 | 76.54 | 8.03 | 82.89 | 9.94 |
| AD-1565464.1 | 16.39 | 4.06 | 10.09 | 2.80 | 31.39 | 3.54 |
| AD-1565465.1 | 20.94 | 5.18 | 12.50 | 2.79 | 45.66 | 3.05 |
| AD-1565466.1 | 82.31 | 6.76 | 75.73 | 28.49 | 92.65 | 18.60 |
| AD-1565467.1 | 102.55 | 23.01 | 84.98 | 22.44 | 116.91 | 27.98 |
| AD-1565702.1 | 116.28 | 14.85 | 85.92 | 14.00 | 76.00 | 18.38 |
| AD-1565468.1 | 121.69 | 34.80 | 86.60 | 5.71 | 79.45 | 23.26 |
| AD-1565469.1 | 46.82 | 18.05 | 34.92 | 10.42 | 53.10 | 9.35 |
| AD-1565703.1 | 40.06 | 8.59 | 41.08 | 11.27 | 50.91 | 16.81 |
| AD-1565704.1 | 23.10 | 2.72 | 32.11 | 12.42 | 49.32 | 8.69 |
| AD-1565705.1 | 20.82 | 4.90 | 14.51 | 3.79 | 54.80 | 11.30 |
| AD-1565470.1 | 58.45 | 4.61 | 77.51 | 21.21 | 78.93 | 12.11 |
| AD-1565471.1 | 8.36 | 2.25 | 14.98 | 3.23 | 29.42 | 6.67 |
| AD-1565472.1 | 67.13 | 22.48 | 107.96 | 18.35 | 81.66 | 15.72 |
| AD-1565473.1 | 17.14 | 6.70 | 12.35 | 2.42 | 52.91 | 13.13 |
| AD-1565706.1 | 12.69 | 1.44 | 17.98 | 1.45 | 33.72 | 10.29 |
| AD-1565474.1 | 7.35 | 1.92 | 11.57 | 0.74 | 12.54 | 0.65 |
| AD-1565707.1 | 14.28 | 5.67 | 12.45 | 3.33 | 16.18 | 4.97 |
| AD-1565475.1 | 104.91 | 17.03 | 92.52 | 25.04 | 68.96 | 7.03 |
| AD-1565476.1 | 13.25 | 5.61 | 10.71 | 3.39 | 13.33 | 2.98 |
| AD-1565477.1 | 20.62 | 5.16 | 21.71 | 6.04 | 39.44 | 2.72 |
| AD-1565708.1 | 20.35 | 7.28 | 34.51 | 0.60 | 46.23 | 16.06 |
| AD-1565478.1 | 113.51 | 34.51 | 84.19 | 13.48 | 93.61 | 8.41 |
| AD-1565479.1 | 120.66 | 38.76 | 113.47 | 21.10 | 107.18 | 23.97 |
| AD-1565709.1 | 96.03 | 16.16 | 82.56 | 20.98 | 34.55 | 10.86 |
| AD-1565480.1 | 9.45 | 3.51 | 15.47 | 2.78 | 25.03 | 4.12 |
| AD-1565481.1 | 11.63 | 2.84 | 8.17 | 1.49 | 24.18 | 8.77 |
| AD-1565482.1 | 55.07 | 21.96 | 62.38 | 10.34 | 76.05 | 18.42 |
| AD-1565483.1 | 42.47 | 1.01 | 32.88 | 6.07 | 40.92 | 10.70 |
| AD-1565484.1 | 41.71 | 8.56 | 35.08 | 6.28 | 47.77 | 12.25 |
| AD-1565710.1 | 14.95 | 7.13 | 25.67 | 5.90 | 22.93 | 2.01 |
| AD-1565711.1 | 23.82 | 14.98 | 23.65 | 4.48 | 19.78 | 3.54 |
| AD-1565485.1 | 25.24 | 2.83 | 19.83 | 6.64 | 25.74 | 2.78 |
| AD-1565486.1 | 10.05 | 1.20 | 14.31 | 1.72 | 31.42 | 7.60 |
| AD-1565712.1 | 5.20 | 2.02 | 19.24 | 6.00 | 20.42 | 4.82 |
| AD-1565713.1 | 9.27 | 2.63 | 19.11 | 2.21 | 25.72 | 3.81 |
| AD-1565487.1 | 46.68 | 5.49 | 28.42 | 4.77 | 77.47 | 6.44 |
| AD-1565714.1 | 5.67 | 1.97 | 5.35 | 2.39 | 11.46 | 2.28 |
| AD-1565488.1 | 9.36 | 2.02 | 11.25 | 2.36 | 20.20 | 1.78 |
| AD-1565715.1 | 3.35 | 1.88 | 5.60 | 2.17 | 18.53 | 6.10 |
| AD-1565716.1 | 3.87 | 1.95 | 8.41 | 5.17 | 10.69 | 3.07 |
| AD-1565489.1 | 9.86 | 1.57 | 14.64 | 3.55 | 19.00 | 5.75 |
| AD-1565717.1 | 3.41 | 0.66 | 2.37 | 0.59 | 12.97 | 3.81 |
| AD-1565718.1 | 2.99 | 0.86 | 3.53 | 2.40 | 8.04 | 3.91 |
| AD-1565490.1 | 24.04 | 8.60 | 11.67 | 1.80 | 31.96 | 10.18 |
| AD-1565719.1 | 6.39 | 5.62 | 2.51 | 0.45 | 8.90 | 2.14 |
| AD-1565491.1 | 88.01 | 24.84 | 75.92 | 22.03 | 84.59 | 11.40 |
| AD-1565720.1 | 8.86 | 1.70 | 4.23 | 2.27 | 13.61 | 2.34 |
| AD-1565721.1 | 2.67 | 0.90 | 4.76 | 0.47 | 12.89 | 4.11 |
| AD-1565492.1 | 9.24 | 3.51 | 4.60 | 2.16 | 9.33 | 1.80 |
| AD-1565493.1 | 5.01 | 2.24 | 6.54 | 2.52 | 25.69 | 11.06 |
| AD-1565722.1 | 16.33 | 5.69 | 19.52 | 3.24 | 66.71 | 10.30 |
| AD-1565723.1 | 4.09 | 1.77 | 10.11 | 5.93 | 10.33 | 2.92 |
| AD-1565494.1 | 40.03 | 5.07 | 32.09 | 5.50 | 64.47 | 10.72 |
| AD-1565495.1 | 9.19 | 5.03 | 12.26 | 3.30 | 29.55 | 9.26 |
| AD-1565724.1 | 3.97 | 1.66 | 3.08 | 1.67 | 5.45 | 1.50 |
| AD-1565496.1 | 10.35 | 2.39 | 20.15 | 3.54 | 23.78 | 8.91 |
| AD-1565725.1 | 10.58 | 5.58 | 4.90 | 2.19 | 16.16 | 7.18 |
| AD-1565497.1 | 12.46 | 5.89 | 10.46 | 3.87 | 16.17 | 5.75 |
| AD-1565498.1 | 12.18 | 4.54 | 8.54 | 1.66 | 12.85 | 5.36 |
| AD-1565499.1 | 28.70 | 6.47 | 25.63 | 9.41 | 33.18 | 6.95 |
| AD-1565500.1 | 5.40 | 1.94 | 4.31 | 1.08 | 7.40 | 2.30 |
| AD-1565726.1 | 4.06 | 1.69 | 2.85 | 0.29 | 9.86 | 5.60 |
| AD-1565501.1 | 38.18 | 13.02 | 39.37 | 15.62 | 49.41 | 13.10 |
| AD-1565502.1 | 10.38 | 6.35 | 10.28 | 5.46 | 32.08 | 11.21 |
| AD-1565503.1 | 5.08 | 2.84 | 7.82 | 2.01 | 7.77 | 0.71 |
| AD-1565801.1 | 18.47 | 3.93 | 10.99 | 7.48 | 22.01 | 4.67 |
| AD-1565802.1 | 3.76 | 1.21 | 4.21 | 1.61 | 7.43 | 1.97 |
| AD-1565803.1 | 7.26 | 4.22 | 7.65 | 1.94 | 12.10 | 3.11 |
| AD-1565804.1 | 1.84 | 0.46 | 1.46 | 0.81 | 4.34 | 0.27 |
| AD-1565805.1 | 1.81 | 1.74 | 1.62 | 1.12 | 7.02 | 3.33 |
| AD-1073418.5 | 1.66 | 0.30 | 2.82 | 1.23 | 7.78 | 4.94 |
| AD-1565504.1 | 3.08 | 1.15 | 3.44 | 1.47 | 7.77 | 2.53 |
| AD-1565504.2 | 5.57 | 0.51 | 6.32 | 3.44 | 12.16 | 4.91 |
| AD-1565505.1 | 6.00 | 3.10 | 9.11 | 0.70 | 19.63 | 5.31 |
| AD-1565800.1 | 2.31 | 0.80 | 3.23 | 1.74 | 8.90 | 5.48 |
| AD-1565506.1 | 23.85 | 10.31 | 28.07 | 3.84 | 54.83 | 10.10 |
| AD-1565727.1 | 3.70 | 2.94 | 4.10 | 2.15 | 6.37 | 2.91 |
| AD-1565507.1 | 21.31 | 7.92 | 27.51 | 3.72 | 45.97 | 12.71 |
| AD-1565728.1 | 5.43 | 1.60 | 3.89 | 1.30 | 13.39 | 1.84 |
| AD-1565508.1 | 16.45 | 8.67 | 8.99 | 1.68 | 34.15 | 11.20 |
| AD-1565509.1 | 7.04 | 2.82 | 6.61 | 2.08 | 12.83 | 2.54 |
| AD-1565730.1 | 3.38 | 1.27 | 6.47 | 1.28 | 12.36 | 3.43 |
| AD-1565510.1 | 14.18 | 2.68 | 24.57 | 2.78 | 27.00 | 1.39 |
| AD-1565511.1 | 50.88 | 7.77 | 59.88 | 11.33 | 85.05 | 19.40 |
| AD-1565512.1 | 5.77 | 0.64 | 16.79 | 8.26 | 18.40 | 4.16 |
| AD-1565731.1 | 5.79 | 1.45 | 4.79 | 1.98 | 9.21 | 1.74 |
| AD-1565513.1 | 7.85 | 3.02 | 8.39 | 4.73 | 15.10 | 2.47 |
| AD-1565514.1 | 8.18 | 4.29 | 8.45 | 1.99 | 14.87 | 2.07 |
| AD-1565732.1 | 10.04 | 3.21 | 20.83 | 10.19 | 28.95 | 5.75 |
| AD-1565515.1 | 31.33 | 13.22 | 25.47 | 9.82 | 66.58 | 12.24 |
| AD-1565516.1 | 32.42 | 6.12 | 22.34 | 7.88 | 52.38 | 10.81 |
| AD-1565733.1 | 10.20 | 4.94 | 7.05 | 2.67 | 29.37 | 6.82 |
| AD-1565517.1 | 89.04 | 28.81 | 134.10 | 30.29 | 77.81 | 27.77 |
| AD-1565734.1 | 8.69 | 5.99 | 8.33 | 2.02 | 28.19 | 7.79 |
| AD-1565518.1 | 113.31 | 25.68 | 99.25 | 17.54 | 105.41 | 19.72 |
| AD-1565735.1 | 8.25 | 2.86 | 7.32 | 2.99 | 17.49 | 2.04 |
| AD-1565736.1 | 89.87 | 11.16 | 82.82 | 8.36 | 64.20 | 3.72 |
| AD-1565519.1 | 33.76 | 6.02 | 27.44 | 10.42 | 58.44 | 19.24 |
| AD-1565520.1 | 9.40 | 1.00 | 20.63 | 6.01 | 29.93 | 7.27 |
| AD-1565521.1 | 16.54 | 5.72 | 10.87 | 2.71 | 24.04 | 8.83 |
| AD-1244360.3 | 0.93 | 0.59 | 2.05 | 1.46 | 6.06 | 1.47 |
| AD-1565522.1 | 2.11 | 0.17 | 2.21 | 0.63 | 10.71 | 6.20 |
| AD-1565806.1 | 2.01 | 1.23 | 1.99 | 0.78 | 6.54 | 4.21 |
| AD-1565807.1 | 1.14 | 0.28 | 2.06 | 0.28 | 9.34 | 3.20 |
| AD-1565808.1 | 6.46 | 2.75 | 13.23 | 2.10 | 30.00 | 3.49 |
| AD-1565809.1 | 31.44 | 9.01 | 31.65 | 16.95 | 61.12 | 8.34 |
| AD-1565810.1 | 73.75 | 16.63 | 55.04 | 14.78 | 90.94 | 25.33 |
| AD-1565812.1 | 4.64 | 0.12 | 8.16 | 2.01 | 16.45 | 9.69 |
| AD-1565813.1 | 3.88 | 2.31 | 5.72 | 3.22 | 12.47 | 5.05 |
| AD-1565814.1 | 3.74 | 1.35 | 2.28 | 1.09 | 11.58 | 10.04 |
| AD-1565522.2 | 3.48 | 2.31 | 5.47 | 1.39 | 8.65 | 3.67 |
| AD-1565523.1 | 8.60 | 5.54 | 16.19 | 3.18 | 24.63 | 10.25 |
| AD-1565811.1 | 1.86 | 0.79 | 3.34 | 1.00 | 6.85 | 1.49 |
| AD-1565524.1 | 72.95 | 22.18 | 71.70 | 9.91 | 94.59 | 16.44 |
| AD-1565525.1 | 6.68 | 1.44 | 29.00 | 11.53 | 32.55 | 7.03 |
| AD-1565526.1 | 64.82 | 8.95 | 81.81 | 23.93 | 94.24 | 1.92 |
| AD-1565737.1 | 4.73 | 1.10 | 5.96 | 1.36 | 27.49 | 7.25 |
| AD-1565527.1 | 35.16 | 10.68 | 57.77 | 13.50 | 44.78 | 5.90 |
| AD-1565738.1 | 33.81 | 11.97 | 37.71 | 4.91 | 40.38 | 9.49 |
| AD-1565528.1 | 4.57 | 0.93 | 13.08 | 6.54 | 16.65 | 3.80 |
| AD-1565739.1 | 13.69 | 2.79 | 7.63 | 0.94 | 17.67 | 1.57 |
| AD-1565529.1 | 12.48 | 6.69 | 12.41 | 3.01 | 24.60 | 4.68 |
| AD-1565740.1 | 46.59 | 11.69 | 24.59 | 13.81 | 29.99 | 8.28 |
| AD-1565530.1 | 3.85 | 1.11 | 16.59 | 6.50 | 24.15 | 14.29 |
| AD-1565741.1 | 4.79 | 2.45 | 5.19 | 2.76 | 11.67 | 1.29 |
| AD-1565531.1 | 2.88 | 0.62 | 8.86 | 2.91 | 29.15 | 16.15 |
| AD-1565532.1 | 47.20 | 12.54 | 54.02 | 12.23 | 60.18 | 10.88 |
| AD-1565533.1 | 52.58 | 14.14 | 52.92 | 6.95 | 68.08 | 20.69 |
| AD-1565534.1 | 16.47 | 2.43 | 36.07 | 8.10 | 38.80 | 1.21 |
| AD-1565535.1 | 19.47 | 1.42 | 18.84 | 0.59 | 88.34 | 12.82 |
| AD-1565536.1 | 5.75 | 2.08 | 26.98 | 12.23 | 32.41 | 10.44 |
| AD-1565537.1 | 2.45 | 1.00 | 14.01 | 3.91 | 15.90 | 7.45 |
| AD-1565742.1 | 8.77 | 3.85 | 14.00 | 8.58 | 28.85 | 4.45 |
| AD-1565538.1 | 41.11 | 17.44 | 17.75 | 3.59 | 36.81 | 13.99 |
| AD-1565539.1 | 6.54 | 1.80 | 23.36 | 8.41 | 35.51 | 12.28 |
| AD-1565540.1 | 10.90 | 3.12 | 33.16 | 11.52 | 49.84 | 15.31 |
| AD-1565743.1 | 78.79 | 17.64 | 56.91 | 8.13 | 67.87 | 7.64 |
| AD-1565541.1 | 89.10 | 26.43 | 118.75 | 23.82 | 89.25 | 13.47 |
| AD-1565542.1 | 38.04 | 7.88 | 75.90 | 21.39 | 33.19 | 9.91 |
| AD-1565543.1 | 30.20 | 9.87 | 29.14 | 4.70 | 41.52 | 4.90 |
| AD-1565544.1 | 9.42 | 2.27 | 28.40 | 7.23 | 39.24 | 12.42 |
| AD-1565744.1 | 24.73 | 6.76 | 22.51 | 8.57 | 25.91 | 5.69 |
| AD-1565545.1 | 47.11 | 6.45 | 68.77 | 12.27 | 59.03 | 19.68 |
| AD-1565745.1 | 6.33 | 1.91 | 4.99 | 2.25 | 10.10 | 3.22 |
| AD-1565546.1 | 19.20 | 3.77 | 28.33 | 6.33 | 52.11 | 19.47 |
| AD-1565547.1 | 5.54 | 1.02 | 15.31 | 5.28 | 33.54 | 9.36 |
| AD-1565548.1 | 8.24 | 3.75 | 14.70 | 2.67 | 40.16 | 5.50 |
| AD-1565746.1 | 8.80 | 2.96 | 7.57 | 2.68 | 13.62 | 1.74 |
| AD-1565549.1 | 5.83 | 2.43 | 10.39 | 0.49 | 20.05 | 4.04 |
| AD-1565550.1 | 20.30 | 6.68 | 20.60 | 4.03 | 50.94 | 7.85 |
| AD-1565551.1 | 5.55 | 2.48 | 14.71 | 3.54 | 40.87 | 9.99 |
| AD-1244365.3 | 2.81 | 0.70 | 6.43 | 2.73 | 14.36 | 7.50 |
| AD-1565552.1 | 4.23 | 2.73 | 4.99 | 1.74 | 23.97 | 7.92 |
| AD-1565553.1 | 3.13 | 1.08 | 4.01 | 2.83 | 14.81 | 3.86 |
| AD-1565815.1 | 20.58 | 6.87 | 17.87 | 5.67 | 55.24 | 13.57 |
| AD-1565816.1 | 9.35 | 5.93 | 6.40 | 1.94 | 17.06 | 5.64 |
| AD-1565818.1 | 71.18 | 34.11 | 91.54 | 39.75 | 102.07 | 7.11 |
| AD-1565819.1 | 8.53 | 2.68 | 16.42 | 9.17 | 37.73 | 10.42 |
| AD-1565820.1 | 4.30 | 1.60 | 16.39 | 15.44 | 31.97 | 6.06 |
| AD-1565552.2 | 8.71 | 4.40 | 17.83 | 6.52 | 34.81 | 10.71 |
| AD-1565553.2 | 9.88 | 2.16 | 15.76 | 3.45 | 18.52 | 1.32 |
| AD-1565554.1 | 86.10 | 20.06 | 92.44 | 20.16 | 90.05 | 11.05 |
| AD-1565817.1 | 8.82 | 3.58 | 9.94 | 1.98 | 27.04 | 8.06 |
| AD-1565555.1 | 60.03 | 7.25 | 79.65 | 1.93 | 94.66 | 18.30 |
| AD-1565747.1 | 3.71 | 0.52 | 4.30 | 0.82 | 5.49 | 1.97 |
| AD-1565556.1 | 6.54 | 1.27 | 18.17 | 7.56 | 24.57 | 9.17 |
| AD-1565557.1 | 6.55 | 0.71 | 11.80 | 1.61 | 14.15 | 4.83 |
| AD-1565558.1 | 34.90 | 6.82 | 45.74 | 16.31 | 51.71 | 5.43 |
| AD-1565559.1 | 7.56 | 3.35 | 16.90 | 6.13 | 35.70 | 6.70 |
| AD-1565560.1 | 12.01 | 4.77 | 20.12 | 8.08 | 42.42 | 14.79 |
| AD-1565561.1 | 14.87 | 2.55 | 41.04 | 16.82 | 56.34 | 19.15 |
| AD-1565562.1 | 31.27 | 1.55 | 39.84 | 11.11 | 68.61 | 16.49 |
| AD-1565748.1 | 4.73 | 2.30 | 7.31 | 2.75 | 6.16 | 3.13 |
| AD-1565563.1 | 11.56 | 3.31 | 14.52 | 3.50 | 32.01 | 6.14 |
| AD-1565564.1 | 45.30 | 5.78 | 31.11 | 13.84 | 62.81 | 24.12 |
| AD-1565565.1 | 7.88 | 3.48 | 17.14 | 3.33 | 37.36 | 12.76 |
| AD-1565566.1 | 8.76 | 0.08 | 25.95 | 2.71 | 16.79 | 4.03 |
| AD-1565567.1 | 36.72 | 12.97 | 31.96 | 7.23 | 27.27 | 12.04 |
| AD-1565568.1 | 12.21 | 5.78 | 15.35 | 4.76 | 17.90 | 8.52 |
| AD-1565569.1 | 10.87 | 4.71 | 14.51 | 4.01 | 25.63 | 7.40 |
| AD-1565749.1 | 5.31 | 1.88 | 6.58 | 1.58 | 14.50 | 3.78 |
| AD-1565570.1 | 9.58 | 4.30 | 9.96 | 2.16 | 23.30 | 4.89 |
| AD-1565571.1 | 8.78 | 4.04 | 10.58 | 1.49 | 31.02 | 14.75 |
| AD-1565750.1 | 6.27 | 1.49 | 5.63 | 0.86 | 9.31 | 2.00 |
| AD-1565573.1 | 13.43 | 7.22 | 17.01 | 1.73 | 32.17 | 10.08 |
| AD-1565751.1 | 13.71 | 7.32 | 10.60 | 1.99 | 26.81 | 4.95 |
| AD-1565574.1 | 58.13 | 13.35 | 39.02 | 9.73 | 100.79 | 15.98 |
| AD-1565575.1 | 67.71 | 7.53 | 62.51 | 3.58 | 86.20 | 24.09 |
| AD-1565576.1 | 10.63 | 2.87 | 18.40 | 9.43 | 34.88 | 5.78 |
| AD-1565752.1 | 6.45 | 2.12 | 7.36 | 3.77 | 9.02 | 2.33 |
| AD-1565577.1 | 18.86 | 4.83 | 15.88 | 7.49 | 44.31 | 13.98 |
| AD-1565578.1 | 10.01 | 3.05 | 15.75 | 5.12 | 21.61 | 4.88 |
| AD-1565579.1 | 36.46 | 2.52 | 13.87 | 3.07 | 22.87 | 6.37 |
| AD-1565753.1 | 4.80 | 2.52 | 4.20 | 0.60 | 5.88 | 2.28 |
| AD-1565580.1 | 50.99 | 16.10 | 54.79 | 19.39 | 47.79 | 8.33 |
| AD-1565754.1 | 5.40 | 1.31 | 5.57 | 1.86 | 20.02 | 4.99 |
| AD-1565581.1 | 76.36 | 0.65 | 50.01 | 18.97 | 112.59 | 14.54 |
| AD-1565582.1 | 68.84 | 13.42 | 59.94 | 12.89 | 54.61 | 10.15 |
| AD-1565755.1 | 14.04 | 3.54 | 17.44 | 4.58 | 30.93 | 9.58 |
| AD-1565583.1 | 75.79 | 12.48 | 58.61 | 13.48 | 91.02 | 22.93 |
| AD-1565584.1 | 16.03 | 6.74 | 31.39 | 5.39 | 53.28 | 7.92 |
| AD-1565756.1 | 10.12 | 1.85 | 13.28 | 1.55 | 18.52 | 5.93 |
| AD-1565585.1 | 65.26 | 7.83 | 76.22 | 19.35 | 138.12 | 8.35 |
| AD-1073420.3 | 4.68 | 3.06 | 8.04 | 5.93 | 14.60 | 5.21 |
| AD-1244366.3 | 2.80 | 0.55 | 2.75 | 1.99 | 8.93 | 3.10 |
| AD-1565757.1 | 2.58 | 1.56 | 3.05 | 0.76 | 9.14 | 2.74 |
| AD-1565821.1 | 5.45 | 1.74 | 4.48 | 0.95 | 18.08 | 6.93 |
| AD-1565822.1 | 2.64 | 1.05 | 3.40 | 1.03 | 11.58 | 3.46 |
| AD-1565824.1 | 10.07 | 4.80 | 5.40 | 1.41 | 14.69 | 3.10 |
| AD-1565825.1 | 3.43 | 0.99 | 4.41 | 0.69 | 14.18 | 3.87 |
| AD-1565826.1 | 2.60 | 0.31 | 5.27 | 2.04 | 11.44 | 3.39 |
| AD-1565757.2 | 5.70 | 4.74 | 3.31 | 1.11 | 6.26 | 1.50 |
| AD-1565586.1 | 10.54 | 3.26 | 9.72 | 4.39 | 20.36 | 3.90 |
| AD-1565587.1 | 10.26 | 1.67 | 23.30 | 4.07 | 23.21 | 6.92 |
| AD-1565588.1 | 5.50 | 3.07 | 8.28 | 3.79 | 14.45 | 5.15 |
| AD-1565823.1 | 2.90 | 1.50 | 5.22 | 2.56 | 12.75 | 5.20 |
| AD-1565589.1 | 7.82 | 4.23 | 10.17 | 3.33 | 14.98 | 7.64 |
| AD-1565590.1 | 17.34 | 3.89 | 25.42 | 6.05 | 39.12 | 6.12 |
| AD-1565591.1 | 9.81 | 6.12 | 16.24 | 6.75 | 14.32 | 3.13 |
| AD-1565758.1 | 5.05 | 1.81 | 6.30 | 2.45 | 9.65 | 2.97 |
| AD-1565592.1 | 10.85 | 4.12 | 20.95 | 5.38 | 22.85 | 8.66 |
| AD-1565594.1 | 71.45 | 12.79 | 106.92 | 35.47 | 73.36 | 15.85 |
| AD-1565759.1 | 8.02 | 3.35 | 10.76 | 2.33 | 13.69 | 2.12 |
| AD-1565595.1 | 13.55 | 3.92 | 40.56 | 9.53 | 66.88 | 17.43 |
| AD-1565760.1 | 7.84 | 3.28 | 13.72 | 4.96 | 27.50 | 7.10 |
| AD-1565761.1 | 5.55 | 2.42 | 6.63 | 1.87 | 16.59 | 1.03 |
| AD-1565596.1 | 60.69 | 7.73 | 48.61 | 17.04 | 79.55 | 24.61 |
| AD-1565597.1 | 17.28 | 4.78 | 27.20 | 12.46 | 18.26 | 5.10 |
| AD-1565762.1 | 13.16 | 1.54 | 10.59 | 2.12 | 13.86 | 3.34 |
| AD-1565598.1 | 59.38 | 11.46 | 56.84 | 17.50 | 52.34 | 9.18 |
| AD-1565599.1 | 79.70 | 12.67 | 150.03 | 21.77 | 122.89 | 36.87 |
| AD-1565600.1 | 82.87 | 13.09 | 57.05 | 6.94 | 88.22 | 21.48 |
| AD-1565601.1 | 25.18 | 2.27 | 22.89 | 9.55 | 44.49 | 5.77 |
| AD-1565602.1 | 3.97 | 1.58 | 6.23 | 0.60 | 30.83 | 8.44 |
| AD-1565827.1 | 3.03 | 1.64 | 4.22 | 2.36 | 11.52 | 3.63 |
| AD-1565828.1 | 3.65 | 0.82 | 2.60 | 0.33 | 21.71 | 9.56 |
| AD-1565829.1 | 3.60 | 2.48 | 2.89 | 0.44 | 9.09 | 3.82 |
| AD-1565830.1 | 2.98 | 1.54 | 5.47 | 1.73 | 9.98 | 5.35 |
| AD-1565831.1 | 4.47 | 1.82 | 7.16 | 2.87 | 14.17 | 5.18 |
| AD-1565833.1 | 49.82 | 24.88 | 57.44 | 5.52 | 82.58 | 21.84 |
| AD-1565834.1 | 44.76 | 9.00 | 21.17 | 7.13 | 49.24 | 18.58 |
| AD-1565835.1 | 21.43 | 3.51 | 28.41 | 7.50 | 53.98 | 13.43 |
| AD-1565602.2 | 8.60 | 3.72 | 16.07 | 8.09 | 21.32 | 2.93 |
| AD-1565603.1 | 15.64 | 6.79 | 20.38 | 8.40 | 15.80 | 3.00 |
| AD-1565832.1 | 2.84 | 0.85 | 4.48 | 1.91 | 9.88 | 4.28 |
| AD-1565763.1 | 31.78 | 11.13 | 55.15 | 17.04 | 43.31 | 1.78 |
| AD-1565604.1 | 74.65 | 13.66 | 64.27 | 3.82 | 76.86 | 24.52 |
| AD-1565605.1 | 114.63 | 37.42 | 90.22 | 23.73 | 51.30 | 6.16 |
| AD-1565606.1 | 10.93 | 4.65 | 19.08 | 6.65 | 16.70 | 4.41 |
| AD-1565764.1 | 4.24 | 0.65 | 4.49 | 2.04 | 5.61 | 2.08 |
| AD-1565607.1 | 27.14 | 6.06 | 36.08 | 7.73 | 64.66 | 4.95 |
| AD-1565608.1 | 14.35 | 6.24 | 31.28 | 7.21 | 44.69 | 9.15 |
| AD-1565609.1 | 9.04 | 3.66 | 20.95 | 7.58 | 25.35 | 5.78 |
| AD-1565766.1 | 7.96 | 1.91 | 9.92 | 1.72 | 19.25 | 1.48 |
| AD-1565611.1 | 15.58 | 4.66 | 25.13 | 8.99 | 27.02 | 3.88 |
| AD-1565767.1 | 7.79 | 5.06 | 13.20 | 3.78 | 14.68 | 3.73 |
| AD-1565612.1 | 27.72 | 4.59 | 35.45 | 10.64 | 49.10 | 6.99 |
| AD-1565613.1 | 32.54 | 7.98 | 63.94 | 9.99 | 64.04 | 15.15 |
| AD-1565614.1 | 14.27 | 6.39 | 25.57 | 1.52 | 43.23 | 30.00 |
| AD-1565768.1 | 4.44 | 1.76 | 5.23 | 1.23 | 14.17 | 5.16 |
| AD-1565615.1 | 55.18 | 8.55 | 79.04 | 23.74 | 78.22 | 6.99 |
| AD-1565616.1 | 15.40 | 4.47 | 35.68 | 7.48 | 51.99 | 10.44 |
| AD-1565617.1 | 3.84 | 2.17 | 11.03 | 1.79 | 34.82 | 1.45 |
| AD-1565769.1 | 5.91 | 3.78 | 3.71 | 0.60 | 6.10 | 2.19 |
| AD-1565618.1 | 7.81 | 3.67 | 7.98 | 3.83 | 22.24 | 8.77 |
| AD-1565770.1 | 17.14 | 1.76 | 14.94 | 0.31 | 51.38 | 16.55 |
| AD-1565619.1 | 65.85 | 13.72 | 60.46 | 19.23 | 51.34 | 12.11 |
| AD-1565620.1 | 4.02 | 3.39 | 4.75 | 3.11 | 18.39 | 8.53 |
| AD-1565771.1 | 5.16 | 1.04 | 6.21 | 1.84 | 11.84 | 4.85 |
| AD-1565621.1 | 83.75 | 17.64 | 64.18 | 12.51 | 110.01 | 8.38 |
| AD-1565772.1 | 2.83 | 0.68 | 4.28 | 1.68 | 12.04 | 3.51 |
| AD-1565836.1 | 3.31 | 1.54 | 6.47 | 2.88 | 13.20 | 3.79 |
| AD-1565837.1 | 4.13 | 1.20 | 4.14 | 0.94 | 14.83 | 4.25 |
| AD-1565838.1 | 6.38 | 1.77 | 5.75 | 2.18 | 15.94 | 4.66 |
| AD-1565840.1 | 7.19 | 3.59 | 5.53 | 1.80 | 32.45 | 6.46 |
| AD-1565841.1 | 4.72 | 1.31 | 8.47 | 2.00 | 18.97 | 8.19 |
| AD-1565842.1 | 3.04 | 1.48 | 4.60 | 3.10 | 14.00 | 3.53 |
| AD-822899.17 | 3.51 | 1.21 | 5.57 | 2.82 | 12.90 | 3.86 |
| AD-1565772.2 | 2.85 | 0.87 | 4.95 | 1.83 | 13.34 | 9.42 |
| AD-1565622.1 | 9.09 | 3.35 | 11.85 | 1.77 | 21.74 | 5.30 |
| AD-1565843.1 | 9.58 | 4.09 | 8.54 | 1.89 | 15.97 | 7.50 |
| AD-1565844.1 | 2.75 | 1.37 | 4.20 | 1.48 | 8.94 | 4.30 |
| AD-1565845.1 | 27.92 | 5.48 | 26.58 | 6.38 | 57.51 | 9.61 |
| AD-1565846.1 | 48.68 | 10.51 | 49.20 | 29.92 | 71.91 | 11.76 |
| AD-1565848.1 | 94.29 | 22.52 | 111.68 | 12.87 | 111.38 | 29.52 |
| AD-1565849.1 | 37.68 | 9.68 | 17.51 | 5.53 | 45.10 | 16.47 |
| AD-1565850.1 | 57.87 | 9.01 | 36.20 | 10.32 | 63.68 | 16.98 |
| AD-822926.4 | 7.22 | 4.66 | 4.35 | 1.48 | 17.62 | 7.83 |
| AD-1565623.1 | 8.25 | 3.03 | 11.68 | 4.46 | 14.42 | 3.89 |
| AD-1565839.1 | 6.07 | 2.22 | 5.99 | 5.16 | 11.18 | 3.84 |
| AD-1565624.1 | 6.10 | 1.35 | 8.89 | 1.90 | 9.85 | 2.62 |
| AD-1565847.1 | 9.04 | 3.53 | 6.91 | 2.93 | 38.22 | 4.27 |
| AD-1565625.1 | 60.76 | 1.13 | 51.43 | 8.88 | 33.00 | 0.71 |
| AD-1565626.1 | 8.87 | 3.65 | 8.36 | 3.19 | 9.48 | 1.76 |
| AD-1565773.1 | 6.64 | 1.30 | 13.77 | 6.02 | 38.32 | 6.58 |
| AD-1565627.1 | 7.68 | 2.90 | 8.60 | 2.57 | 9.19 | 3.34 |
| AD-1565628.1 | 27.35 | 5.83 | 27.90 | 9.21 | 42.72 | 13.86 |
| AD-1565629.1 | 12.25 | 4.89 | 42.80 | 12.64 | 37.72 | 0.21 |
| AD-1565774.1 | 17.59 | 5.54 | 5.12 | 0.90 | 18.54 | 7.94 |
| AD-1565630.1 | 12.95 | 1.09 | 29.20 | 7.37 | 36.41 | 6.87 |
| AD-1565631.1 | 14.87 | 4.36 | 29.86 | 5.00 | 30.09 | 6.35 |
| AD-1565775.1 | 12.20 | 0.98 | 10.60 | 2.86 | 11.61 | 3.39 |
| AD-1565632.1 | 34.01 | 6.07 | 33.10 | 1.65 | 43.01 | 7.59 |
| AD-1565776.1 | 59.47 | 10.06 | 46.53 | 13.29 | 76.25 | 10.64 |
| AD-1565777.1 | 3.25 | 3.60 | 4.24 | 1.29 | 7.38 | 4.40 |
| AD-1565634.1 | 19.64 | 6.63 | 24.71 | 9.68 | 12.30 | 3.61 |
| AD-1565778.1 | 18.08 | 3.67 | 20.05 | 8.75 | 19.26 | 5.00 |
| AD-1565635.1 | 24.90 | 4.36 | 27.27 | 3.30 | 17.01 | 6.09 |
| AD-1565636.1 | 18.08 | 5.60 | 26.04 | 6.67 | 19.12 | 5.80 |
| AD-1565637.1 | 24.19 | 7.75 | 22.69 | 7.34 | 22.00 | 7.85 |
| AD-1565638.1 | 20.13 | 4.33 | 21.73 | 5.82 | 23.78 | 7.73 |
| AD-1565639.1 | 19.98 | 6.07 | 17.46 | 5.27 | 17.52 | 4.96 |
| AD-1565779.1 | 16.57 | 5.59 | 23.11 | 7.46 | 18.57 | 2.30 |
| AD-1565640.1 | 24.23 | 7.16 | 24.86 | 4.78 | 22.95 | 5.65 |
| AD-1565641.1 | 14.78 | 4.59 | 20.27 | 7.35 | 15.40 | 4.17 |
| AD-1565642.1 | 22.92 | 7.06 | 27.36 | 1.86 | 22.58 | 4.00 |
| AD-1565643.1 | 21.33 | 5.08 | 25.45 | 4.54 | 21.06 | 4.94 |
| AD-1565644.1 | 21.50 | 4.66 | 28.68 | 4.46 | 21.57 | 3.60 |
| AD-1565645.1 | 20.71 | 1.23 | 30.21 | 6.14 | 24.39 | 5.16 |
| AD-1565646.1 | 25.16 | 2.74 | 21.62 | 2.13 | 26.27 | 4.91 |
| AD-1565851.1 | 32.51 | 12.05 | 25.85 | 3.74 | 28.17 | 4.26 |
| AD-1565852.1 | 23.35 | 2.52 | 24.85 | 2.61 | 25.45 | 1.40 |
| AD-1565853.1 | 20.79 | 5.56 | 15.58 | 2.51 | 23.92 | 2.07 |
| AD-1565854.1 | 21.35 | 2.18 | 16.74 | 4.57 | 37.31 | 10.98 |
| AD-1565857.1 | 89.72 | 24.46 | 60.67 | 10.16 | 72.79 | 19.16 |
| AD-1565858.1 | 32.39 | 5.99 | 20.22 | 3.18 | 34.87 | 11.29 |
| AD-1565859.1 | 44.64 | 4.32 | 28.84 | 7.42 | 41.43 | 14.25 |
| AD-1565647.1 | 33.50 | 6.27 | 23.93 | 7.48 | 20.42 | 3.95 |
| AD-1565648.1 | 17.96 | 3.05 | 16.97 | 2.55 | 15.90 | 1.48 |
| AD-1565855.1 | 24.15 | 5.54 | 18.07 | 0.61 | 37.07 | 7.91 |
| AD-1565856.1 | 32.83 | 3.41 | 20.30 | 3.88 | 46.01 | 8.44 |
| AD-1565649.1 | 21.70 | 5.38 | 31.01 | 4.14 | 14.39 | 2.35 |
| AD-1565650.1 | 14.11 | 2.91 | 16.32 | 3.70 | 13.62 | 10.74 |
| AD-1565651.1 | 15.70 | 3.79 | 23.56 | 8.66 | 14.00 | 4.41 |
| AD-1565652.1 | 28.65 | 5.13 | 32.11 | 6.96 | 41.78 | 11.65 |
| AD-1565653.1 | 18.91 | 3.29 | 22.20 | 8.89 | 16.74 | 4.17 |
| AD-1565780.1 | 21.89 | 7.89 | 22.48 | 5.59 | 25.73 | 7.52 |
| AD-1565654.1 | 28.76 | 5.80 | 27.06 | 9.35 | 36.78 | 10.64 |
| AD-1565655.1 | 14.26 | 1.84 | 16.84 | 2.93 | 22.57 | 3.51 |
| AD-1565781.1 | 22.73 | 5.86 | 23.64 | 7.88 | 26.26 | 4.73 |
| AD-1565656.1 | 8.05 | 3.17 | 18.34 | 3.69 | 20.89 | 1.60 |
| AD-1565657.1 | 37.82 | 7.32 | 34.46 | 4.71 | 46.82 | 15.41 |
| AD-1565658.1 | 20.16 | 5.46 | 22.60 | 1.17 | 33.74 | 16.69 |
| AD-1565659.1 | 21.80 | 5.01 | 32.48 | 6.03 | 27.19 | 5.57 |
| AD-1565660.1 | 18.96 | 4.48 | 25.75 | 6.04 | 33.55 | 9.37 |
| AD-1565782.1 | 19.49 | 5.05 | 13.48 | 3.51 | 23.54 | 5.97 |
| AD-1565661.1 | 23.24 | 4.21 | 30.64 | 8.86 | 21.49 | 5.88 |
| AD-1565662.1 | 22.44 | 1.52 | 29.91 | 6.54 | 23.11 | 6.46 |
| AD-1565663.1 | 19.51 | 3.82 | 19.55 | 2.35 | 22.06 | 6.15 |
| AD-1565664.1 | 20.84 | 2.90 | 14.97 | 3.73 | 16.29 | 4.16 |
| AD-1565783.1 | 19.12 | 7.35 | 16.94 | 6.39 | 19.67 | 8.30 |
| AD-1565665.1 | 17.64 | 0.62 | 29.45 | 9.88 | 29.19 | 7.74 |
| AD-1565784.1 | 16.20 | 5.45 | 15.66 | 5.02 | 13.24 | 3.05 |
| AD-1565666.1 | 17.38 | 4.44 | 22.81 | 7.48 | 24.53 | 5.40 |
| AD-1565667.1 | 17.79 | 4.54 | 26.44 | 5.86 | 16.24 | 2.00 |
| AD-1565785.1 | 18.10 | 7.14 | 10.86 | 5.66 | 17.76 | 6.07 |
| AD-1565668.1 | 41.49 | 8.93 | 43.99 | 2.72 | 37.17 | 6.96 |
| AD-1565669.1 | 24.91 | 3.24 | 25.11 | 4.53 | 14.49 | 3.34 |
| AD-1565670.1 | 14.17 | 6.35 | 21.96 | 9.65 | 29.29 | 2.34 |
| AD-1565860.1 | 12.24 | 3.88 | 14.80 | 4.75 | 36.53 | 4.17 |
| AD-1565861.1 | 19.87 | 5.39 | 14.91 | 8.45 | 25.82 | 7.66 |
| AD-1565862.1 | 16.77 | 5.82 | 23.11 | 4.79 | 28.52 | 8.22 |
| AD-1565863.1 | 20.42 | 7.47 | 23.10 | 8.82 | 22.00 | 7.25 |
| AD-1565864.1 | 23.64 | 12.69 | 17.75 | 5.07 | 21.37 | 4.31 |
| AD-1565866.1 | 21.29 | 7.65 | 17.97 | 4.76 | 25.56 | 4.55 |
| AD-1565670.2 | 20.00 | 4.48 | 19.21 | 5.61 | 15.66 | 2.61 |
| AD-1565671.1 | 34.15 | 10.48 | 35.84 | 7.21 | 26.67 | 12.46 |
| AD-1565865.1 | 22.15 | 7.26 | 22.19 | 5.76 | 29.14 | 5.04 |
| AD-1565786.1 | 19.30 | 7.79 | 15.01 | 4.01 | 23.94 | 1.39 |
| AD-1565672.1 | 18.40 | 4.74 | 28.01 | 8.90 | 16.08 | 3.92 |
| AD-1565673.1 | 11.46 | 5.01 | 19.74 | 4.14 | 18.41 | 3.39 |
| AD-1565674.1 | 22.27 | 7.50 | 26.45 | 5.36 | 22.47 | 7.98 |
| AD-1565787.1 | 20.36 | 2.47 | 9.49 | 3.21 | 18.01 | 2.96 |
| AD-1565675.1 | 28.40 | 5.05 | 34.29 | 3.63 | 29.59 | 10.48 |
| AD-1565788.1 | 15.79 | 4.25 | 15.72 | 4.64 | 16.69 | 0.95 |
| AD-1565676.1 | 22.39 | 5.86 | 24.17 | 3.94 | 28.08 | 5.73 |
| AD-1565677.1 | 22.77 | 5.35 | 26.27 | 7.04 | 22.49 | 7.99 |
| AD-1565678.1 | 14.89 | 2.15 | 17.14 | 5.83 | 19.52 | 5.04 |
| AD-1565679.1 | 17.93 | 3.69 | 18.38 | 3.92 | 21.25 | 4.78 |
| AD-1565680.1 | 16.07 | 3.75 | 20.49 | 2.95 | 19.02 | 1.58 |
| AD-1565681.1 | 66.05 | 9.80 | 45.76 | 2.54 | 76.24 | 17.73 |
| AD-1565789.1 | 17.89 | 6.69 | 17.09 | 1.75 | 15.21 | 4.11 |
| AD-1565790.1 | 15.85 | 0.71 | 12.83 | 5.40 | 24.07 | 8.61 |
| AD-1565682.1 | 28.99 | 9.62 | 28.53 | 6.54 | 34.55 | 13.61 |
| AD-1565791.1 | 13.75 | 1.62 | 12.50 | 3.96 | 34.69 | 3.47 |
| AD-1565683.1 | 33.85 | 9.82 | 28.85 | 2.71 | 27.77 | 9.17 |
| AD-1565684.1 | 46.44 | 16.14 | 47.20 | 12.01 | 92.00 | 26.93 |
| AD-1565685.1 | 44.46 | 12.33 | 36.23 | 5.10 | 58.69 | 23.40 |
| AD-1565867.1 | 24.71 | 5.92 | 23.04 | 2.85 | 31.52 | 3.79 |
| AD-1565868.1 | 33.54 | 8.52 | 31.27 | 12.38 | 37.03 | 4.99 |
| AD-1565869.1 | 27.19 | 9.45 | 33.17 | 9.74 | 30.69 | 5.68 |
| AD-1565870.1 | 22.23 | 4.78 | 21.55 | 2.08 | 29.63 | 9.89 |
| AD-1565871.1 | 22.89 | 4.89 | 24.65 | 0.94 | 21.11 | 1.91 |
| AD-1565872.1 | 28.60 | 9.58 | 27.43 | 10.76 | 23.01 | 5.72 |
| AD-1565873.1 | 15.65 | 4.07 | 30.34 | 7.91 | 29.58 | 6.70 |
| AD-1565874.1 | 77.37 | 12.83 | 106.84 | 16.49 | 58.43 | 2.43 |
| AD-1565875.1 | 77.77 | 23.99 | 44.29 | 12.88 | 55.96 | 13.56 |
| AD-1565876.1 | 114.72 | 42.05 | 55.55 | 13.12 | 52.88 | 7.61 |
| AD-1565686.1 | 23.56 | 4.75 | 40.73 | 8.81 | 43.94 | 3.80 |
| AD-1565687.1 | 23.34 | 1.87 | 21.53 | 3.56 | 22.50 | 4.26 |
| AD-1565688.1 | 27.59 | 6.13 | 27.27 | 2.35 | 24.05 | 3.29 |
| AD-1565877.1 | 21.23 | 2.76 | 37.13 | 7.45 | 45.66 | 6.89 |
| AD-1565689.1 | 26.48 | 4.22 | 22.79 | 6.21 | 24.67 | 3.21 |
| AD-1565792.1 | 10.48 | 2.13 | 8.23 | 1.24 | 21.07 | 8.93 |
| AD-1565690.1 | 28.90 | 2.94 | 27.49 | 4.31 | 22.85 | 4.91 |
| AD-1565691.1 | 30.69 | 8.84 | 33.68 | 2.31 | 34.86 | 6.66 |

### Example 3. Validation of Human MYOC siRNAs in a Mouse Glaucoma Model

[0813] To test human MYOC siRNAs in vivo, a glaucoma mouse model was used: synergistic activation mediator (SAM) mice comprising a humanized MYOC locus comprising a Y437H mutation (SAM-MYOC mice). In these mice, a SAM guide RNA targeting the MYOC promoter (SAM gRNA) can be used to increase expression of the humanized MYOC comprising the Y437H mutation, resulting in increased intraocular pressure (IOP). The SAM-MYOC mice were generated by crossing mice comprising genomically integrated dCas9 synergistic activation mediator (SAM) system components (dCas9-VP64 and MCP-p65-HSF1) as one transcript driven by the endogenous Rosa26 promoter (described in US 2019/0284572 and WO 2019/183123, each of which is herein incorporated by reference) with mice comprising a humanized MYOC locus comprising a Y437H mutation. In these mice, the mouse Myoc sequence from the start codon to the stop codon was replaced with the corresponding human MYOC sequence. The inserted human MYOC sequence comprises a Y437H mutation, which is a mutation associated with elevated IOP and development of glaucoma. Injection of AAV2.Y3F or lentivirus encoding the SAM guide RNA targeting the MYOC promoter resulted in increased humanized MYOC Y437H expression in the limbal ring (trabecular meshwork TM, iris, and ciliary body (CB)), and this correlated with increased IOP, validating the SAM-MYOC mice as a suitable MYOC disease model with increased IOP (data not shown).

[0814] siRNAs targeting human MYOC were tested to determine if they could lower the high intraocular pressure (IOP) observed in SAM mice comprising a humanized MYOC locus comprising a Y437H mutation (SAM-MYOC mice) following treatment with the SAM gRNA. The experimental setup is shown in FIG. 1A. The SAM gRNA was administered via intracameral (IC) injection at day 0, and baseline IOP was measured. IOP was then measured over the following five weeks. At week five, MYOC siRNA AD-822899 (1 μL, 15 μg dose) was administered via intravitreal (IVT) injection, and IOP was measured at various timepoints over the subsequent weeks. There were three treatment groups: (1) naïve control mice; (2) SAM-gRNA-treated mice treated with human MYOC siRNA; and (3) SAM-gRNA-treated mice treated with luciferase siRNA. As shown in FIG. 1B, the human MYOC siRNA lowered IOP in the SAM-MYOC mice treated with the SAM gRNA, reversing and returning the IOP to baseline levels starting at D7 after siRNA injection, whereas the luciferase siRNA had no effect on IOP.

[0815] Several additional siRNAs targeting human MYOC were then tested at a lower dose to determine if they could lower the IOP observed in the SAM-MYOC mice following treatment with lentiviral SAM gRNA. Mice were bilaterally injected with SAM gRNA and siRNAs. The experimental setup is shown in FIG. 2A. SAM gRNA was administered via intracameral (IC) injection at day 0, and baseline IOP was measured. IOP was then measured over the following five weeks. At week five, MYOC siRNAs AD-822899, AD-1565804, AD-1565837, AD-1193175, or AD-1565503 (1 μL, 7.5 μg dose) were administered via intravitreal (IVT) injection, and IOP was measured at various timepoints over the subsequent weeks. mRNA knockdown in the limbal ring was tested by qPCR, and RNASCOPE® analysis was done. The control groups included naïve control mice, PBS-treated mice, and LV-SAM gRNA-treated mice. As shown in FIG. 2B, each human MYOC siRNA lowered IOP in the SAM-MYOC mice treated with SAM gRNA, reversing and returning the IOP to baseline levels soon after siRNA injection. As shown in FIG. 2C, each human MYOC siRNA decreased human MYOC mRNA expression relative to the LV-SAM-gRNA group as measured by qPCR in a sample from the limbal ring. RNASCOPE® analysis confirmed that the siRNAs mediated knockdown of human MYOC mRNA in the SAM-MYOC mice (FIG. 2D).

[0816] Human MYOC siRNAs AD-1565804 or AD-1565837 were then tested at even lower doses to determine if they could lower the IOP observed in the SAM-MYOC mice following treatment with lentiviral SAM-g4. Mice were bilaterally injected with SAM gRNA and siRNA. The experimental setup is shown in FIG. 3A. SAM-g4 was administered via intracameral (IC) injection at day 0, and baseline IOP was measured. IOP was then measured over the following five weeks. At week five, MYOC siRNAs AD-1565804 or AD-1565837 (1 μL, 3.75 μg dose or 1.87 μg dose) were administered via intravitreal (IVT) injection, and IOP was measured at various timepoints over the subsequent weeks. mRNA knockdown in the limbal ring was tested by qPCR, and RNASCOPE® analysis was done. The control groups included naïve control mice, PBS-treated mice, and LV-SAM-gRNA-treated mice. As shown in FIG. 3B, each human MYOC siRNA lowered IOP in the SAM-MYOC mice treated with SAM gRNA at each dose tested, reversing and returning the IOP to baseline levels soon after siRNA injection. As shown in FIG. 3C, each human MYOC siRNA decreased human MYOC mRNA expression relative to the LV-SAM gRNA group as measured by qPCR in a sample from the limbal ring at each dose tested.

### Example 4. Validation of Human MYOC siRNAs in a Non-Human Primate (NHP) Glaucoma Model

[0817] siRNAs targeting MYOC were tested to determine if they could lower the high intraocular pressure (IOP) observed in a non-human primate (NHP) glaucoma model. The study design is shown in Table 4. The animals received a PBS control or various doses of the duplex AD-1565837 or the duplex AD-1565804.

[0818] OE's and intraocular pressure (IOP) were measured pre-study, on days 3, 8, 15, 29, and 57, and once during week 12. Electroretinography (ERG) was performed pre-study, mid-study (week 6), and at termination (week 12). Aqueous humor (AH) was collected pre-dose, week 4, week 8 and at termination. At termination, the following eye samples were collected from the right eye; AH, vitreous humor (VH), cornea, iris, trabecular meshwork TM, ciliary body (CB), sclera (limbal ring without TM), retina, and all remaining tissue in posterior segment of the eye. Blood was collected twice at pre-dose and termination. Hematology, coagulation, and clinical chemistry studies were performed on the blood samples.

[0819] Tissues were collected for histopathology at termination including the right eye, optic nerve and extra-ocular and peri-ocular tissues: Brain, right (cerebral hemisphere); Esophagus, proximal; Stomach, esophageal-gastric junction; Eyelid, upper with palpebral conjunctivae, right; Eyelid, lower with palpebral conjunctivae, right; Heart, apex; Jejunum; Kidney, right cortex; Liver, right median lobe; Lacrimal Gl, right; Deep Cervical, lymph node, right; Mandibular, lymph node, right; Sciatic nerve, right; Muscle, rectus femoris; Muscle, diaphragm; Muscle, extraocular (lateral and medial rectus, right); Ovary, right; Mandibular salivary gland, right; Spinal cord, cervical; Spinal cord, thoracic; Spinal cord, lumbar; Thyroid, right; Tongue; Tonsil, right; Trachea; and Uterus.

TABLE 4
NHP DC Selection Study Design

| | | Dose Level | | |
|---|---|---|---|---|
| Group | Test Article | (μg/eye) | No. Monkeys | Total |
| 1 | PBS | 0 | 3 | 31 |
| 2 | AD- | 10 | 3 | |
| 3 | 1565837 | 30 | 3 | |
| 4 | | 100 | 3 | |
| 5 | | 300 | 3 | |
| 6 | | 1000* | 2 | |
| 7 | AD- | 10 | 3 | |
| 8 | 1565804 | 30 | 3 | |
| 9 | | 100 | 3 | |
| 10 | | 300 | 3 | |
| 11 | | 1000* | 2 | |

*Animals treated with highest dose: both eyes will be examined with histopathology read outs.

[0820] MYOC protein knock down in the TM was analyzed at day 85. The knock down results are shown in FIG. 4. About a 50% reduction in MYOC protein in the TM was seen with the AD-1565837 duplex, while minimal knockdown was observed with the AD-1565804 duplex. MYOC protein in the aqueous humor was analyzed at days −35, 22, 50, and day 85 (terminal collection). As depicted in FIG. 5, MYOC protein knockdown of about 50% was observed at day 50, but not at day 85. MYOC protein knock down in the vitreous humor, iris, ciliary body, and sclera was analyzed at day 85 (terminal collection). The results are shown in FIG. 6A for vitreous humor and ciliary body, and in FIG. 6B for iris and sclera. At day 85, no knock down was observed in the MYOC mRNA for either duplex evaluated (FIG. 7).

The application's sequence listing, which the Patent Office published only in electronic form, follows.

SEQUENCE LISTING (2226 sequences)

SEQ ID NO: 1 - DNA, 2100 bp, Homo sapiens
gagccagcaaggccacccatccaggcacctctcagcacagcagagctttccagaggaagcctcaccaagcctctgcaatgaggttcttctgtgcacgttgctgcagctttgggcctgagatgccagctgtccagctgctgcttctggcctgcctggtgtgggatgtgggggccaggacagctcagctcaggaaggccaatgaccagagtggccgatgccagtataccttcagtgtggccagtcccaatgaatccagctgcccagagcagagccaggccatgtcagtcatccataacttacagagagacagcagcacccaacgcttagacctggaggccaccaaagctcgactcagctccctggagagcctcctccaccaattgaccttggaccaggctgccaggccccaggagacccaggaggggctgcagagggagctgggcaccctgaggcgggagcgggaccagctggaaacccaaaccagagagttggagactgcctacagcaacctcctccgagacaagtcagttctggaggaagagaagaagcgactaaggcaagaaaatgagaatctggccaggaggttggaaagcagcagccaggaggtagcaaggctgagaaggggccagtgtccccagacccgagacactgctcgggctgtgccaccaggctccagagaagtttctacgtggaatttggacactttggccttccaggaactgaagtccgagctaactgaagttcctgcttcccgaattttgaaggagagcccatctggctatctcaggagtggagagggagacaccggatgtggagaactagtttgggtaggagagcctctcacgctgagaacagcagaaacaattactggcaagtatggtgtgtggatgcgagaccccaagcccacctacccctacacccaggagaccacgtggagaatcgacacagttggcacggatgtccgccaggtttttgagtatgacctcatcagccagtttatgcagggctacccttctaaggttcacatactgcctaggccactggaaagcacgggtgctgtggtgtactcggggagcctctatttccagggcgctgagtccagaactgtcataagatatgagctgaataccgagacagtgaaggctgagaaggaaatccctggagctggctaccacggacagttcccgtattcttggggtggctacacggacattgacttggctgtggatgaagcaggcctctgggtcatttacagcaccgatgaggccaaaggtgccattgtcctctccaaactgaacccagagaatctggaactcgaacaaacctgggagacaaacatccgtaagcagtcagtcgccaatgccttcatcatctgtggcaccttgtacaccgtcagcagctacacctcagcagatgctaccgtcaactttgcttatgacacaggcacaggtatcagcaagaccctgaccatcccattcaagaaccgctataagtacagcagcatgattgactacaaccccctggagaagaagctctttgcctgggacaacttgaacatggtcacttatgacatcaagctctccaagatgtgaaaagcctccaagctgtacaggcaatggcagaaggagatgctcagggctcctggggggagcaggctgaagggagagccagccagccagggcccaggcagctttgactgctttccaagttttcattaatccagaaggatgaacatggtcaccatctaactattcaggaattgtagtctgagggcgtagacaatttcatataataaatatcctttatcttctgtcagcatttatgggatgtttaatgacatagttcaagttttcttgtgatttggggcaaaagctgtaaggcataatagtttcttcctgaaaaccattgctcttgcatgttacatggttaccacaagccacaataaaaagcataacttctaaaggaagcagaatagctcctctggccagcatcgaatataagtaagatgcatttactacagttggcttctaatgcttcagatagaatacagttgggtctcacataaccctttacattgtgaaataaaattttcttacccaa

SEQ ID NO: 2 - DNA, 2100 bp, Homo sapiens
ttgggtaagaaaattttatttcacaatgtaaagggttatgtgagacccaactgtattctatctgaagcattagaagccaactgtagtaaatgcatcttacttatattcgatgctggccagaggagctattctgcttcctttagaagttatgctttttattgtggcttgtggtaaccatgtaacatgcaagagcaatggttttcaggaagaaactattatgccttacagcttttgccccaaatcacaagaaaacttgaactatgtcattaaacatcccataaatgctgacagaagataaaggatatttattatatgaaattgtctacgccctcagactacaattcctgaatagttagatggtgaccatgttcatccttctggattaatgaaaacttggaaagcagtcaaagctgcctgggccctggctggctggctctcccttcagcctgctccccccaggagccctgagcatctccttctgccattgcctgtacagcttggaggcttttcacatcttggagagcttgatgtcataagtgaccatgttcaagttgtcccaggcaaagagcttcttctccagggggttgtagtcaatcatgctgctgtacttatagcggttcttgaatgggatggtcagggtcttgctgatacctgtgcctgtgtcataagcaaagttgacggtagcatctgctgaggtgtagctgctgacggtgtacaaggtgccacagatgatgaaggcattggcgactgactgcttacggatgtttgtctcccaggtttgttcgagttccagattctctgggttcagtttggagaggacaatggcacctttggcctcatcggtgctgtaaatgacccagaggcctgcttcatccacagccaagtcaatgtccgtgtagccaccccaagaatacgggaactgtccgtggtagccagctccagggatttccttctcagccttcactgtctcggtattcagctcatatcttatgacagttctggactcagcgccctggaaatagaggctccccgagtacaccacagcacccgtgctttccagtggcctaggcagtatgtgaaccttagaagggtagccctgcataaactggctgatgaggtcatactcaaaaacctggcggacatccgtgccaactgtgtcgattctccacgtggtctcctgggtgtaggggtaggtgggcttggggtctcgcatccacacaccatacttgccagtaattgtttctgctgttctcagcgtgagaggctctcctacccaaactagttctccacatccggtgtctccctctccactcctgagatagccagatgggctctccttcaaaattcgggaagcaggaacttcagttagctcggacttcagttcctggaaggccaaagtgtccaaattccacgtagaaacttctctggagcctggtggcacagcccgagcagtgtctcgggtctggggacactggccccttctcagccttgctacctcctggctgctgctttccaacctcctggccagattctcattttcttgccttagtcgcttcttctcttcctccagaactgacttgtctcggaggaggttgctgtaggcagtctccaactctctggtttgggtttccagctggtcccgctcccgcctcagggtgcccagctccctctgcagcccctcctgggtctcctggggcctggcagcctggtccaaggtcaattggtggaggaggctctccagggagctgagtcgagctttggtggcctccaggtctaagcgttgggtgctgctgtctctctgtaagttatggatgactgacatggcctggctctgctctgggcagctggattcattgggactggccacactgaaggtatactggcatcggccactctggtcattggccttcctgagctgagctgtcctggcccccacatcccacaccaggcaggccagaagcagcagctggacagctggcatctcaggcccaaagctgcagcaacgtgcacagaagaacctcattgcagaggcttggtgaggcttcctctggaaagctctgctgtgctgagaggtgcctggatgggtggccttgctggctc

SEQ ID NO: 3 - protein, 16 aa, Unknown
  Description of Unknown: RFGF sequence
AAVALLPAVLLALLAP

SEQ ID NO: 4 - protein, 11 aa, Unknown
  Description of Unknown: RFGF analogue sequence
AALLPVLLAAP

SEQ ID NO: 5 - protein, 13 aa, Human immunodeficiency virus
GRKKRRQRRRPPQ

SEQ ID NO: 6 - protein, 16 aa, Drosophila sp.
RQIKIWFQNRRMKWKK

SEQ ID NO: 7 - RNA, 21 nt, Artificial Sequence
  Description of Artificial Sequence: Synthetic oligonucleotide
cucucagcacagcagagcuua

SEQ ID NO: 8 - RNA, 21 nt, Artificial Sequence
  Description of Artificial Sequence: Synthetic oligonucleotide
cucucagcacagcagagcuua

SEQ ID NO: 9 - RNA, 21 nt, Artificial Sequence
  Description of Artificial Sequence: Synthetic oligonucleotide
cucucagcacagcagagcuua

SEQ ID NO: 10 - RNA, 21 nt, Artificial Sequence
  Description of Artificial Sequence: Synthetic oligonucleotide
ucucagcacagcagagcuuua

SEQ ID NO: 11 - RNA, 21 nt, Artificial Sequence
  Description of Artificial Sequence: Synthetic oligonucleotide
cagcagagcuuuccagaggaa

SEQ ID NO: 12 - RNA, 21 nt, Artificial Sequence
  Description of Artificial Sequence: Synthetic oligonucleotide
aaugagguucuucugugcaca

SEQ ID NO: 13 - RNA, 21 nt, Artificial Sequence
  Description of Artificial Sequence: Synthetic oligonucleotide
aaugagguucuucugugcaca

SEQ ID NO: 14 - RNA, 21 nt, Artificial Sequence
  Description of Artificial Sequence: Synthetic oligonucleotide
augagguucuucugugcacga

SEQ ID NO: 15 - RNA, 21 nt, Artificial Sequence
  Description of Artificial Sequence: Synthetic oligonucleotide
ugagguucuucugugcacgua

SEQ ID NO: 16 - RNA, 21 nt, Artificial Sequence
  Description of Artificial Sequence: Synthetic oligonucleotide
ugagguucuucugugcacgua

SEQ ID NO: 17 - RNA, 21 nt, Artificial Sequence
  Description of Artificial Sequence: Synthetic oligonucleotide
gagguucuucugugcacguua

SEQ ID NO: 18 - RNA, 21 nt, Artificial Sequence
  Description of Artificial Sequence: Synthetic oligonucleotide
agguucuucugugcacguuga

SEQ ID NO: 19 - RNA, 21 nt, Artificial Sequence
  Description of Artificial Sequence: Synthetic oligonucleotide
agguucuucugugcacguuga

SEQ ID NO: 20 - RNA, 21 nt, Artificial Sequence
  Description of Artificial Sequence: Synthetic oligonucleotide
agguucuucugugcacguuga

SEQ ID NO: 21 - RNA, 21 nt, Artificial Sequence
  Description of Artificial Sequence: Synthetic oligonucleotide
agguucuucugugcacguuga

SEQ ID NO: 22 - RNA, 21 nt, Artificial Sequence
  Description of Artificial Sequence: Synthetic oligonucleotide
agguacuucugugcacguuga

SEQ ID NO: 23 - RNA, 21 nt, Artificial Sequence
  Description of Artificial Sequence: Synthetic oligonucleotide
aggaucuucugugcacguuga

SEQ ID NO: 24 - RNA, 21 nt, Artificial Sequence
  Description of Artificial Sequence: Synthetic oligonucleotide
agcuucuucugugcacguuga

SEQ ID NO: 25 - RNA, 21 nt, Artificial Sequence
  Description of Artificial Sequence: Synthetic oligonucleotide
agguucuucugugcacguuga

SEQ ID NO: 26 - RNA, 21 nt, Artificial Sequence
  Description of Artificial Sequence: Synthetic oligonucleotide
gguucuucugugcacguugca

SEQ ID NO: 27 - RNA, 21 nt, Artificial Sequence
  Description of Artificial Sequence: Synthetic oligonucleotide
gguucuucugugcacguugca

SEQ ID NO: 28 - RNA, 19 nt, Artificial Sequence
  Description of Artificial Sequence: Synthetic oligonucleotide
guucuucugugcacguuga

SEQ ID NO: 29 - RNA, 21 nt, Artificial Sequence
  Description of Artificial Sequence: Synthetic oligonucleotide
guucuucugugcacguugcua

SEQ ID NO: 30 - RNA, 21 nt, Artificial Sequence
  Description of Artificial Sequence: Synthetic oligonucleotide
uucuucugugcacguugcuga

SEQ ID NO: 31 - RNA, 21 nt, Artificial Sequence
  Description of Artificial Sequence: Synthetic oligonucleotide
ucuucugugcacguugcugca

SEQ ID NO: 32 - RNA, 21 nt, Artificial Sequence
  Description of Artificial Sequence: Synthetic oligonucleotide
ucuucugugcacguugcugca

SEQ ID NO: 33 - RNA, 21 nt, Artificial Sequence
  Description of Artificial Sequence: Synthetic oligonucleotide
cuucugugcacguugcugcaa

SEQ ID NO: 34 - RNA, 21 nt, Artificial Sequence
  Description of Artificial Sequence: Synthetic oligonucleotide
cuucugugcacguugcugcaa

SEQ ID NO: 35 - RNA, 21 nt, Artificial Sequence
  Description of Artificial Sequence: Synthetic oligonucleotide
uucugugcacguugcugcaga

SEQ ID NO: 36 - RNA, 21 nt, Artificial Sequence
  Description of Artificial Sequence: Synthetic oligonucleotide
ucugugcacguugcugcagca

SEQ ID NO: 37 - RNA, 21 nt, Artificial Sequence
  Description of Artificial Sequence: Synthetic oligonucleotide
cugugcacguugcugcagcua

SEQ ID NO: 38 - RNA, 21 nt, Artificial Sequence
  Description of Artificial Sequence: Synthetic oligonucleotide
cugugcacguugcugcagcua

SEQ ID NO: 39 - RNA, 21 nt, Artificial Sequence
  Description of Artificial Sequence: Synthetic oligonucleotide
ugugcacguugcugcagcuua

SEQ ID NO: 40 - RNA, 21 nt, Artificial Sequence
  Description of Artificial Sequence: Synthetic oligonucleotide
gugcacguugcugcagcuuua

SEQ ID NO: 41 - RNA, 21 nt, Artificial Sequence
  Description of Artificial Sequence: Synthetic oligonucleotide
gcacguugcugcagcuuugga

SEQ ID NO: 42 - RNA, 21 nt, Artificial Sequence
  Description of Artificial Sequence: Synthetic oligonucleotide
cacguugcugcagcuuuggga

SEQ ID NO: 43 - RNA, 21 nt, Artificial Sequence
  Description of Artificial Sequence: Synthetic oligonucleotide
gagaugccagcuguccagcua

SEQ ID NO: 44 - RNA, 21 nt, Artificial Sequence
  Description of Artificial Sequence: Synthetic oligonucleotide
gaugccagcuguccagcugca

SEQ ID NO: 45 - RNA, 21 nt, Artificial Sequence
  Description of Artificial Sequence: Synthetic oligonucleotide
cuguccagcugcugcuucuga

SEQ ID NO: 46 - RNA, 21 nt, Artificial Sequence
  Description of Artificial Sequence: Synthetic oligonucleotide
ccagcugcugcuucuggccua

SEQ ID NO: 47 - RNA, 21 nt, Artificial Sequence
  Description of Artificial Sequence: Synthetic oligonucleotide
cuggccugccuggugugggaa

SEQ ID NO: 48 - RNA, 21 nt, Artificial Sequence
  Description of Artificial Sequence: Synthetic oligonucleotide
cuggccugccuggugugggaa

SEQ ID NO: 49 - RNA, 21 nt, Artificial Sequence
  Description of Artificial Sequence: Synthetic oligonucleotide
cuggccugccuggugugggaa

SEQ ID NO: 50 - RNA, 21 nt, Artificial Sequence
  Description of Artificial Sequence: Synthetic oligonucleotide
uggccugccuggugugggaua

SEQ ID NO: 51 - RNA, 21 nt, Artificial Sequence
  Description of Artificial Sequence: Synthetic oligonucleotide
gccugccuggugugugaugua

SEQ ID NO: 52 - RNA, 21 nt, Artificial Sequence
  Description of Artificial Sequence: Synthetic oligonucleotide
gccugccuggugugggaugua

SEQ ID NO: 53 - RNA, 21 nt, Artificial Sequence
  Description of Artificial Sequence: Synthetic oligonucleotide
agaguggccgaugccaguaua

SEQ ID NO: 54 - RNA, 21 nt, Artificial Sequence
  Description of Artificial Sequence: Synthetic oligonucleotide
aguguggccagucccaaugaa

SEQ ID NO: 55 - RNA, 21 nt, Artificial Sequence
  Description of Artificial Sequence: Synthetic oligonucleotide
guguggccagucccaaugaaa

SEQ ID NO: 56 - RNA, 21 nt, Artificial Sequence
  Description of Artificial Sequence: Synthetic oligonucleotide
guguggccagucccaaugaaa

SEQ ID NO: 57 - RNA, 21 nt, Artificial Sequence
  Description of Artificial Sequence: Synthetic oligonucleotide
gccaggccaugucagucauca

SEQ ID NO: 58 - RNA, 21 nt, Artificial Sequence
  Description of Artificial Sequence: Synthetic oligonucleotide
gccaggccaugucagucauca

SEQ ID NO: 59 - RNA, 21 nt, Artificial Sequence
  Description of Artificial Sequence: Synthetic oligonucleotide
gccaggccaugucagucauca

SEQ ID NO: 60 - RNA, 21 nt, Artificial Sequence
  Description of Artificial Sequence: Synthetic oligonucleotide
ggccaugucagucauccauaa

SEQ ID NO: 61 - RNA, 21 nt, Artificial Sequence
  Description of Artificial Sequence: Synthetic oligonucleotide
gaccuggaggccaccaaagca

SEQ ID NO: 62 - RNA, 21 nt, Artificial Sequence
  Description of Artificial Sequence: Synthetic oligonucleotide
cuggaggccaccaaagcucga

SEQ ID NO: 63 - RNA, 21 nt, Artificial Sequence
  Description of Artificial Sequence: Synthetic oligonucleotide
gaaacccaaaccagagaguua

SEQ ID NO: 64 - RNA, 21 nt, Artificial Sequence
  Description of Artificial Sequence: Synthetic oligonucleotide
cagcaaccuccuccgagacaa

SEQ ID NO: 65 - RNA, 21 nt, Artificial Sequence
  Description of Artificial Sequence: Synthetic oligonucleotide
cagcaaccuccuccgagacaa

SEQ ID NO: 66 - RNA, 21 nt, Artificial Sequence
  Description of Artificial Sequence: Synthetic oligonucleotide
gcaaccuccuccgagacaaga

SEQ ID NO: 67 - RNA, 21 nt, Artificial Sequence
  Description of Artificial Sequence: Synthetic oligonucleotide
gcaaccuccuccgagacaaga

SEQ ID NO: 68 - RNA, 21 nt, Artificial Sequence
  Description of Artificial Sequence: Synthetic oligonucleotide
gcaaccuccuccgagacaaga

SEQ ID NO: 69 - RNA, 21 nt, Artificial Sequence
  Description of Artificial Sequence: Synthetic oligonucleotide
agacaagucaguucuggagga

SEQ ID NO: 70 - RNA, 21 nt, Artificial Sequence
  Description of Artificial Sequence: Synthetic oligonucleotide
caagucaguucuggaggaaga

SEQ ID NO: 71 - RNA, 21 nt, Artificial Sequence
  Description of Artificial Sequence: Synthetic oligonucleotide
gucaguucuggaggaagagaa

SEQ ID NO: 72 - RNA, 21 nt, Artificial Sequence
  Description of Artificial Sequence: Synthetic oligonucleotide
agaaucuggccaggagguuga

SEQ ID NO: 73 - RNA, 21 nt, Artificial Sequence
  Description of Artificial Sequence: Synthetic oligonucleotide
uggccaggagguuggaaagca

SEQ ID NO: 74 - RNA, 21 nt, Artificial Sequence
  Description of Artificial Sequence: Synthetic oligonucleotide
uggccaggagguuggaaagca

SEQ ID NO: 75 - RNA, 21 nt, Artificial Sequence
  Description of Artificial Sequence: Synthetic oligonucleotide
cagccaggagguagcaaggca

SEQ ID NO: 76 - RNA, 21 nt, Artificial Sequence
  Description of Artificial Sequence: Synthetic oligonucleotide
ugccaccaggcuccagagaaa

SEQ ID NO: 77 - RNA, 21 nt, Artificial Sequence
  Description of Artificial Sequence: Synthetic oligonucleotide
aauuuggacacuuuggccuua

SEQ ID NO: 78 - RNA, 21 nt, Artificial Sequence
  Description of Artificial Sequence: Synthetic oligonucleotide
aauuuggacacuuuggccuua

SEQ ID NO: 79 - RNA, 21 nt, Artificial Sequence
  Description of Artificial Sequence: Synthetic oligonucleotide
acacuuuggccuuccaggaaa

SEQ ID NO: 80 - RNA, 21 nt, Artificial Sequence
  Description of Artificial Sequence: Synthetic oligonucleotide
cuuuggccuuccaggaacuga

SEQ ID NO: 81 - RNA, 21 nt, Artificial Sequence
  Description of Artificial Sequence: Synthetic oligonucleotide
aggaacugaaguccgagcuaa

SEQ ID NO: 82 - RNA, 21 nt, Artificial Sequence
  Description of Artificial Sequence: Synthetic oligonucleotide
aggaacugaaguccgagcuaa

SEQ ID NO: 83 - RNA, 21 nt, Artificial Sequence
  Description of Artificial Sequence: Synthetic oligonucleotide
gaaguccgagcuaacugaaga

SEQ ID NO: 84 - RNA, 21 nt, Artificial Sequence
  Description of Artificial Sequence: Synthetic oligonucleotide
gcuaacugaaguuccugcuua

SEQ ID NO: 85 - RNA, 21 nt, Artificial Sequence
  Description of Artificial Sequence: Synthetic oligonucleotide
cuaacugaaguuccugcuuca

SEQ ID NO: 86 - RNA, 21 nt, Artificial Sequence
  Description of Artificial Sequence: Synthetic oligonucleotide
gaaguuccugcuucccgaaua

SEQ ID NO: 87 - RNA, 21 nt, Artificial Sequence
  Description of Artificial Sequence: Synthetic oligonucleotide
gagaacuaguuuggguaggaa

SEQ ID NO: 88 - RNA, 21 nt, Artificial Sequence
  Description of Artificial Sequence: Synthetic oligonucleotide
gagaacuaguuuggguaggaa

SEQ ID NO: 89 - RNA, 21 nt, Artificial Sequence
  Description of Artificial Sequence: Synthetic oligonucleotide
acuaguuuggguaggagagca

SEQ ID NO: 90 - RNA, 21 nt, Artificial Sequence
  Description of Artificial Sequence: Synthetic oligonucleotide
acuaguuuggguaggagagca

SEQ ID NO: 91 - RNA, 21 nt, Artificial Sequence
  Description of Artificial Sequence: Synthetic oligonucleotide
ggguaggagagccucucacga

SEQ ID NO: 92 - RNA, 21 nt, Artificial Sequence
  Description of Artificial Sequence: Synthetic oligonucleotide
guaggagagccucucacgcua

SEQ ID NO: 93 - RNA, 21 nt, Artificial Sequence
  Description of Artificial Sequence: Synthetic oligonucleotide
guaggagagccucucacgcua

SEQ ID NO: 94 - RNA, 21 nt, Artificial Sequence
  Description of Artificial Sequence: Synthetic oligonucleotide
uaggagagccucucacgcuga

SEQ ID NO: 95 - RNA, 21 nt, Artificial Sequence
  Description of Artificial Sequence: Synthetic oligonucleotide
aggagagccucucacgcugaa

SEQ ID NO: 96 - RNA, 21 nt, Artificial Sequence
  Description of Artificial Sequence: Synthetic oligonucleotide
gccucucacgcugagaacaga

SEQ ID NO: 97 - RNA, 21 nt, Artificial Sequence
  Description of Artificial Sequence: Synthetic oligonucleotide
gccucucacgcugagaacaga

SEQ ID NO: 98 - RNA, 21 nt, Artificial Sequence
  Description of Artificial Sequence: Synthetic oligonucleotide
gccucucacgcugagaacaga

SEQ ID NO: 99 - RNA, 21 nt, Artificial Sequence
  Description of Artificial Sequence: Synthetic oligonucleotide
cacgcugagaacagcagaaaa

SEQ ID NO: 100 - RNA, 21 nt, Artificial Sequence
  Description of Artificial Sequence: Synthetic oligonucleotide
acgcugagaacagcagaaaca

SEQ ID NO: 101 - RNA, 21 nt, Artificial Sequence
  Description of Artificial Sequence: Synthetic oligonucleotide
cgcugagaacagcagaaacaa

SEQ ID NO: 102 - RNA, 21 nt, Artificial Sequence
  Description of Artificial Sequence: Synthetic oligonucleotide
cgcugagaacagcagaaacaa

SEQ ID NO: 103 - RNA, 21 nt, Artificial Sequence
  Description of Artificial Sequence: Synthetic oligonucleotide
gcugagaacagcagaaacaaa

SEQ ID NO: 104 - RNA, 21 nt, Artificial Sequence
  Description of Artificial Sequence: Synthetic oligonucleotide
cugagaacagcagaaacaaua

SEQ ID NO: 105 - RNA, 21 nt, Artificial Sequence
  Description of Artificial Sequence: Synthetic oligonucleotide
ugagaacagcagaaacaauua

SEQ ID NO: 106 - RNA, 21 nt, Artificial Sequence
  Description of Artificial Sequence: Synthetic oligonucleotide
gagaacagcagaaacaauuaa

SEQ ID NO: 107 - RNA, 21 nt, Artificial Sequence
  Description of Artificial Sequence: Synthetic oligonucleotide
agaacagcagaaacaauuaca

SEQ ID NO: 108 - RNA, 21 nt, Artificial Sequence
  Description of Artificial Sequence: Synthetic oligonucleotide
agaacagcagaaacaauuaca

SEQ ID NO: 109 - RNA, 21 nt, Artificial Sequence
  Description of Artificial Sequence: Synthetic oligonucleotide
gaacagcagaaacaauuacua

SEQ ID NO: 110 - RNA, 21 nt, Artificial Sequence
  Description of Artificial Sequence: Synthetic oligonucleotide
aacagcagaaacaauuacuga

SEQ ID NO: 111 - RNA, 21 nt, Artificial Sequence
  Description of Artificial Sequence: Synthetic oligonucleotide
aacagcagaaacaauuacuga

SEQ ID NO: 112 - RNA, 21 nt, Artificial Sequence
  Description of Artificial Sequence: Synthetic oligonucleotide
aacaccagaaacaauuacuga

SEQ ID NO: 113 - RNA, 21 nt, Artificial Sequence
  Description of Artificial Sequence: Synthetic oligonucleotide
aacugcagaaacaauuacuga

SEQ ID NO: 114 - RNA, 21 nt, Artificial Sequence
  Description of Artificial Sequence: Synthetic oligonucleotide
aagagcagaaacaauuacuga

SEQ ID NO: 115 - RNA, 21 nt, Artificial Sequence
  Description of Artificial Sequence: Synthetic oligonucleotide
aacagcagaaacaauuacuga

SEQ ID NO: 116 - RNA, 21 nt, Artificial Sequence
  Description of Artificial Sequence: Synthetic oligonucleotide
aacagcagaaacaauuacuga

SEQ ID NO: 117 - RNA, 21 nt, Artificial Sequence
  Description of Artificial Sequence: Synthetic oligonucleotide
aacagcagaaacaauuacuga

SEQ ID NO: 118 - RNA, 21 nt, Artificial Sequence
  Description of Artificial Sequence: Synthetic oligonucleotide
acagcagaaacaauuacugga

SEQ ID NO: 119 - RNA, 19 nt, Artificial Sequence
  Description of Artificial Sequence: Synthetic oligonucleotide
cagcagaaacaauuacuga

SEQ ID NO: 120 - RNA, 21 nt, Artificial Sequence
  Description of Artificial Sequence: Synthetic oligonucleotide
cagcagaaacaauuacuggca

SEQ ID NO: 121 - RNA, 21 nt, Artificial Sequence
  Description of Artificial Sequence: Synthetic oligonucleotide
agcagaaacaauuacuggcaa

SEQ ID NO: 122 - RNA, 21 nt, Artificial Sequence
  Description of Artificial Sequence: Synthetic oligonucleotide
gcagaaacaauuacuggcaaa

SEQ ID NO: 123 - RNA, 21 nt, Artificial Sequence
  Description of Artificial Sequence: Synthetic oligonucleotide
cagaaacaauuacuggcaaga

SEQ ID NO: 124 - RNA, 21 nt, Artificial Sequence
  Description of Artificial Sequence: Synthetic oligonucleotide
cagaaacaauuacuggcaaga

SEQ ID NO: 125 - RNA, 21 nt, Artificial Sequence
  Description of Artificial Sequence: Synthetic oligonucleotide
agaaacaauuacugucaagua

SEQ ID NO: 126 - RNA, 21 nt, Artificial Sequence
  Description of Artificial Sequence: Synthetic oligonucleotide
gaaacaauuacuggcaaguaa

SEQ ID NO: 127 - RNA, 21 nt, Artificial Sequence
  Description of Artificial Sequence: Synthetic oligonucleotide
aaacaauuacuggcaaguaua

SEQ ID NO: 128 - RNA, 21 nt, Artificial Sequence
  Description of Artificial Sequence: Synthetic oligonucleotide
aacaauuacuggcaaguauga

SEQ ID NO: 129 - RNA, 21 nt, Artificial Sequence
  Description of Artificial Sequence: Synthetic oligonucleotide
aacaauuacuggcaaguauga

SEQ ID NO: 130 - RNA, 21 nt, Artificial Sequence
  Description of Artificial Sequence: Synthetic oligonucleotide
ggcaaguaugguguguggaua

SEQ ID NO: 131 - RNA, 21 nt, Artificial Sequence
  Description of Artificial Sequence: Synthetic oligonucleotide
ggcaaguaugguguguggaua

SEQ ID NO: 132 - RNA, 21 nt, Artificial Sequence
  Description of Artificial Sequence: Synthetic oligonucleotide
ggcaaguaugguguguggaua

SEQ ID NO: 133 - RNA, 21 nt, Artificial Sequence
  Description of Artificial Sequence: Synthetic oligonucleotide
caaguaugguguguggaugca

SEQ ID NO: 134 - RNA, 21 nt, Artificial Sequence
  Description of Artificial Sequence: Synthetic oligonucleotide
caaguaugguguguggaugca

SEQ ID NO: 135 - RNA, 21 nt, Artificial Sequence
  Description of Artificial Sequence: Synthetic oligonucleotide
ugaguaugaccucaucagcca

SEQ ID NO: 136 - RNA, 21 nt, Artificial Sequence
  Description of Artificial Sequence: Synthetic oligonucleotide
gaguaugaccucaucagccaa

SEQ ID NO: 137 - RNA, 21 nt, Artificial Sequence
  Description of Artificial Sequence: Synthetic oligonucleotide
aguaugaccucaucagccaga

SEQ ID NO: 138 - RNA, 21 nt, Artificial Sequence
  Description of Artificial Sequence: Synthetic oligonucleotide
guaugaccucaucagccagua

SEQ ID NO: 139 - RNA, 21 nt, Artificial Sequence
  Description of Artificial Sequence: Synthetic oligonucleotide
guaugaccucaucagccagua

SEQ ID NO: 140 - RNA, 21 nt, Artificial Sequence
  Description of Artificial Sequence: Synthetic oligonucleotide
uaugaccucaucagccaguua

SEQ ID NO: 141 - RNA, 21 nt, Artificial Sequence
  Description of Artificial Sequence: Synthetic oligonucleotide
augaccucaucagccaguuua

SEQ ID NO: 142 - RNA, 21 nt, Artificial Sequence
  Description of Artificial Sequence: Synthetic oligonucleotide
ugaccucaucagccaguuuaa

SEQ ID NO: 143 - RNA, 21 nt, Artificial Sequence
  Description of Artificial Sequence: Synthetic oligonucleotide
gaccucaucagccaguuuaua

SEQ ID NO: 144 - RNA, 21 nt, Artificial Sequence
  Description of Artificial Sequence: Synthetic oligonucleotide
accucaucagccaguuuauga

SEQ ID NO: 145 - RNA, 21 nt, Artificial Sequence
  Description of Artificial Sequence: Synthetic oligonucleotide
ccucaucagccaguuuaugca

SEQ ID NO: 146 - RNA, 21 nt, Artificial Sequence
  Description of Artificial Sequence: Synthetic oligonucleotide
ccucaucagccaguuuaugca

SEQ ID NO: 147 - RNA, 21 nt, Artificial Sequence
  Description of Artificial Sequence: Synthetic oligonucleotide
ccucaucagccaguuuaugca

SEQ ID NO: 148 - RNA, 21 nt, Artificial Sequence
  Description of Artificial Sequence: Synthetic oligonucleotide
ccucaucagccaguuuaugca

SEQ ID NO: 149 - RNA, 21 nt, Artificial Sequence
  Description of Artificial Sequence: Synthetic oligonucleotide
ccucaucagccaguuuaugca

SEQ ID NO: 150 - RNA, 21 nt, Artificial Sequence
  Description of Artificial Sequence: Synthetic oligonucleotide
ccucaucagccaguuuaugca

SEQ ID NO: 151 - DNA, 21 bp, Artificial Sequence
  Description of Artificial Sequence: Synthetic oligonucleotide
  Description of Combined DNA/RNA Molecule: Synthetic oligonucleotide
ccucaucagccaguuuaugca

SEQ ID NO: 152 - RNA, 21 nt, Artificial Sequence
  Description of Artificial Sequence: Synthetic oligonucleotide
ccucuucagccaguuuaugca

SEQ ID NO: 153 - RNA, 21 nt, Artificial Sequence
  Description of Artificial Sequence: Synthetic oligonucleotide
ccugaucagccaguuuaugca

SEQ ID NO: 154 - RNA, 21 nt, Artificial Sequence
  Description of Artificial Sequence: Synthetic oligonucleotide
ccacaucagccaguuuaugca

SEQ ID NO: 155 - RNA, 21 nt, Artificial Sequence
  Description of Artificial Sequence: Synthetic oligonucleotide
ccucaucagccaguuuaugca

SEQ ID NO: 156 - RNA, 21 nt, Artificial Sequence
  Description of Artificial Sequence: Synthetic oligonucleotide
cucaucagccaguuuaugcaa

SEQ ID NO: 157 - RNA, 19 nt, Artificial Sequence
  Description of Artificial Sequence: Synthetic oligonucleotide
ucaucagccaguuuaugca

SEQ ID NO: 158 - RNA, 21 nt, Artificial Sequence
  Description of Artificial Sequence: Synthetic oligonucleotide
ucaucagccaguuuaugcaga

SEQ ID NO: 159 - RNA, 21 nt, Artificial Sequence
  Description of Artificial Sequence: Synthetic oligonucleotide
ucaucagccaguuuaugcaga

SEQ ID NO: 160 - RNA, 21 nt, Artificial Sequence
  Description of Artificial Sequence: Synthetic oligonucleotide
caucagccaguuuaugcagga

SEQ ID NO: 161 - RNA, 21 nt, Artificial Sequence
  Description of Artificial Sequence: Synthetic oligonucleotide
aucagccaguuuaugcaggga

SEQ ID NO: 162 - RNA, 21 nt, Artificial Sequence
  Description of Artificial Sequence: Synthetic oligonucleotide
aucagccaguuuaugcaggga

SEQ ID NO: 163 - RNA, 21 nt, Artificial Sequence
  Description of Artificial Sequence: Synthetic oligonucleotide
ucagccaguuuaugcagggca

SEQ ID NO: 164 - RNA, 21 nt, Artificial Sequence
  Description of Artificial Sequence: Synthetic oligonucleotide
cagccaguuuaugcagggcua

SEQ ID NO: 165 - RNA, 21 nt, Artificial Sequence
  Description of Artificial Sequence: Synthetic oligonucleotide
agccaguuuaugcagggcuaa

SEQ ID NO: 166 - RNA, 21 nt, Artificial Sequence
  Description of Artificial Sequence: Synthetic oligonucleotide
agccaguuuaugcagggcuaa

SEQ ID NO: 167 - RNA, 21 nt, Artificial Sequence
  Description of Artificial Sequence: Synthetic oligonucleotide
gccaguuuaugcagggcuaca

SEQ ID NO: 168 - RNA, 21 nt, Artificial Sequence
  Description of Artificial Sequence: Synthetic oligonucleotide
gccaguuuaugcagugcuaca

SEQ ID NO: 169 - RNA, 21 nt, Artificial Sequence
  Description of Artificial Sequence: Synthetic oligonucleotide
ccaguuuaugcagggcuacca

SEQ ID NO: 170 - RNA, 21 nt, Artificial Sequence
  Description of Artificial Sequence: Synthetic oligonucleotide
ccaguuuaugcaggucuacca

SEQ ID NO: 171 - RNA, 21 nt, Artificial Sequence
  Description of Artificial Sequence: Synthetic oligonucleotide
ugcagggcuacccuucuaaga

SEQ ID NO: 172 - RNA, 21 nt, Artificial Sequence
  Description of Artificial Sequence: Synthetic oligonucleotide
gggugcugugguguacucgga

SEQ ID NO: 173 - RNA, 21 nt, Artificial Sequence
  Description of Artificial Sequence: Synthetic oligonucleotide
gggugcugugguguacucgga

SEQ ID NO: 174 - RNA, 21 nt, Artificial Sequence
  Description of Artificial Sequence: Synthetic oligonucleotide
gagccucuauuuccagggcga

SEQ ID NO: 175 - RNA, 21 nt, Artificial Sequence
  Description of Artificial Sequence: Synthetic oligonucleotide
gagccucuauuuccagggcga

SEQ ID NO: 176 - RNA, 21 nt, Artificial Sequence
  Description of Artificial Sequence: Synthetic oligonucleotide
ccucuauuuccagggcgcuga

SEQ ID NO: 177 - RNA, 21 nt, Artificial Sequence
  Description of Artificial Sequence: Synthetic oligonucleotide
uuccagggcgcugaguccaga

SEQ ID NO: 178 - RNA, 21 nt, Artificial Sequence
  Description of Artificial Sequence: Synthetic oligonucleotide
uuccagggcgcugaguccaga

SEQ ID NO: 179 - RNA, 21 nt, Artificial Sequence
  Description of Artificial Sequence: Synthetic oligonucleotide
uuccagggcgcugaguccaga

SEQ ID NO: 180 - RNA, 21 nt, Artificial Sequence
  Description of Artificial Sequence: Synthetic oligonucleotide
agggcgcugaguccagaacua

SEQ ID NO: 181 - RNA, 21 nt, Artificial Sequence
  Description of Artificial Sequence: Synthetic oligonucleotide
gggcgcugaguccagaacuga

SEQ ID NO: 182 - RNA, 21 nt, Artificial Sequence
  Description of Artificial Sequence: Synthetic oligonucleotide
gggcgcugaguccagaacuga

SEQ ID NO: 183 - RNA, 21 nt, Artificial Sequence
  Description of Artificial Sequence: Synthetic oligonucleotide
gggcgcugaguccagaacuga

SEQ ID NO: 184 - RNA, 21 nt, Artificial Sequence
  Description of Artificial Sequence: Synthetic oligonucleotide
ggcgcugaguccagaacugua

SEQ ID NO: 185 - RNA, 21 nt, Artificial Sequence
  Description of Artificial Sequence: Synthetic oligonucleotide
gcgcugaguccagaacuguca

SEQ ID NO: 186 - RNA, 21 nt, Artificial Sequence
  Description of Artificial Sequence: Synthetic oligonucleotide
cgcugaguccagaacugucaa

SEQ ID NO: 187 - RNA, 21 nt, Artificial Sequence
  Description of Artificial Sequence: Synthetic oligonucleotide
gcugaguccagaacugucaua

SEQ ID NO: 188 - RNA, 21 nt, Artificial Sequence
  Description of Artificial Sequence: Synthetic oligonucleotide
cugaguccagaacugucauaa

SEQ ID NO: 189 - RNA, 21 nt, Artificial Sequence
  Description of Artificial Sequence: Synthetic oligonucleotide
cugaguccagaacugucauaa

SEQ ID NO: 190 - RNA, 21 nt, Artificial Sequence
  Description of Artificial Sequence: Synthetic oligonucleotide
cugaguccagaacugucauaa

SEQ ID NO: 191 - RNA, 21 nt, Artificial Sequence
  Description of Artificial Sequence: Synthetic oligonucleotide
ugaguccagaacugucauaaa

SEQ ID NO: 192 - RNA, 21 nt, Artificial Sequence
  Description of Artificial Sequence: Synthetic oligonucleotide
gaguccagaacugucauaaga

SEQ ID NO: 193 - RNA, 21 nt, Artificial Sequence
  Description of Artificial Sequence: Synthetic oligonucleotide
gaguccagaacugucauaaga

SEQ ID NO: 194 - RNA, 21 nt, Artificial Sequence
  Description of Artificial Sequence: Synthetic oligonucleotide
aguccagaacugucauaagaa

SEQ ID NO: 195 - RNA, 21 nt, Artificial Sequence
  Description of Artificial Sequence: Synthetic oligonucleotide
aguccagaacugucauaagaa

SEQ ID NO: 196 - RNA, 21 nt, Artificial Sequence
  Description of Artificial Sequence: Synthetic oligonucleotide
guccagaacugucauaagaua

SEQ ID NO: 197 - RNA, 21 nt, Artificial Sequence
  Description of Artificial Sequence: Synthetic oligonucleotide
guccagaacugucauaagaua

SEQ ID NO: 198 - RNA, 21 nt, Artificial Sequence
  Description of Artificial Sequence: Synthetic oligonucleotide
guccagaacugucauaagaua

SEQ ID NO: 199 - RNA, 21 nt, Artificial Sequence
  Description of Artificial Sequence: Synthetic oligonucleotide
guccagaacugucauaagaua

SEQ ID NO: 200 - RNA, 21 nt, Artificial Sequence
  Description of Artificial Sequence: Synthetic oligonucleotide
guccagaacugucauaagaua

SEQ ID NO: 201 - RNA, 21 nt, Artificial Sequence
  Description of Artificial Sequence: Synthetic oligonucleotide
guccugaacugucauaagaua

SEQ ID NO: 202 - RNA, 21 nt, Artificial Sequence
  Description of Artificial Sequence: Synthetic oligonucleotide
gucgagaacugucauaagaua

SEQ ID NO: 203 - RNA, 21 nt, Artificial Sequence
  Description of Artificial Sequence: Synthetic oligonucleotide
gugcagaacugucauaagaua

SEQ ID NO: 204 - RNA, 21 nt, Artificial Sequence
  Description of Artificial Sequence: Synthetic oligonucleotide
guccagaacugucauaagaua

SEQ ID NO: 205 - RNA, 21 nt, Artificial Sequence
  Description of Artificial Sequence: Synthetic oligonucleotide
guccagaacugucauaagaua

SEQ ID NO: 206 - RNA, 21 nt, Artificial Sequence
  Description of Artificial Sequence: Synthetic oligonucleotide
uccagaacugucauaagauaa

SEQ ID NO: 207 - RNA, 19 nt, Artificial Sequence
  Description of Artificial Sequence: Synthetic oligonucleotide
ccagaacugucauaagaua

SEQ ID NO: 208 - RNA, 21 nt, Artificial Sequence
  Description of Artificial Sequence: Synthetic oligonucleotide
ccagaacugucauaagauaua

SEQ ID NO: 209 - RNA, 21 nt, Artificial Sequence
  Description of Artificial Sequence: Synthetic oligonucleotide
cagaacugucauaagauauga

SEQ ID NO: 210 - RNA, 21 nt, Artificial Sequence
  Description of Artificial Sequence: Synthetic oligonucleotide
cagaacugucauaagauauga

SEQ ID NO: 211 - RNA, 21 nt, Artificial Sequence
  Description of Artificial Sequence: Synthetic oligonucleotide
cagaacugucauaagauauga

SEQ ID NO: 212 - RNA, 21 nt, Artificial Sequence
  Description of Artificial Sequence: Synthetic oligonucleotide
agaacugucauaagauaugaa

SEQ ID NO: 213 - RNA, 21 nt, Artificial Sequence
  Description of Artificial Sequence: Synthetic oligonucleotide
agaacugucauaagauaugaa

SEQ ID NO: 214 - RNA, 21 nt, Artificial Sequence
  Description of Artificial Sequence: Synthetic oligonucleotide
gaacugucauaagauaugaga

SEQ ID NO: 215 - RNA, 21 nt, Artificial Sequence
  Description of Artificial Sequence: Synthetic oligonucleotide
aacugucauaagauaugagca

SEQ ID NO: 216 - RNA, 21 nt, Artificial Sequence
  Description of Artificial Sequence: Synthetic oligonucleotide
acugucauaagauaugagcua

SEQ ID NO: 217 - RNA, 21 nt, Artificial Sequence
  Description of Artificial Sequence: Synthetic oligonucleotide
cugucauaagauaugagcuga

SEQ ID NO: 218 - RNA, 21 nt, Artificial Sequence
  Description of Artificial Sequence: Synthetic oligonucleotide
cugucauaagauaugagcuga

SEQ ID NO: 219 - RNA, 21 nt, Artificial Sequence
  Description of Artificial Sequence: Synthetic oligonucleotide
cugucauaagauaugagcuga

SEQ ID NO: 220 - RNA, 21 nt, Artificial Sequence
  Description of Artificial Sequence: Synthetic oligonucleotide
ugucauaagauaugagcugaa

SEQ ID NO: 221 - RNA, 21 nt, Artificial Sequence
  Description of Artificial Sequence: Synthetic oligonucleotide
cauaagauaugagcugaauaa

SEQ ID NO: 222 - RNA, 21 nt, Artificial Sequence
  Description of Artificial Sequence: Synthetic oligonucleotide
cugaauaccgagacagugaaa

SEQ ID NO: 223 - RNA, 21 nt, Artificial Sequence
  Description of Artificial Sequence: Synthetic oligonucleotide
uaccgagacagugaaggcuga

SEQ ID NO: 224 - RNA, 21 nt, Artificial Sequence
  Description of Artificial Sequence: Synthetic oligonucleotide
uaccgagacagugaaggcuga

SEQ ID NO: 225 - RNA, 21 nt, Artificial Sequence
  Description of Artificial Sequence: Synthetic oligonucleotide
acagugaaggcugagaaggaa

SEQ ID NO: 226 - RNA, 21 nt, Artificial Sequence
  Description of Artificial Sequence: Synthetic oligonucleotide
acagugaaggcugagaaggaa

SEQ ID NO: 227 - RNA, 21 nt, Artificial Sequence
  Description of Artificial Sequence: Synthetic oligonucleotide
acagugaaggcugagaaggaa

SEQ ID NO: 228 - RNA, 21 nt, Artificial Sequence
  Description of Artificial Sequence: Synthetic oligonucleotide
ugagaaggaaaucccuggaga

SEQ ID NO: 229 - RNA, 21 nt, Artificial Sequence
  Description of Artificial Sequence: Synthetic oligonucleotide
gccaaaggugccauuguccua

SEQ ID NO: 230 - RNA, 21 nt, Artificial Sequence
  Description of Artificial Sequence: Synthetic oligonucleotide
ccaaacugaacccagagaaua

SEQ ID NO: 231 - RNA, 21 nt, Artificial Sequence
  Description of Artificial Sequence: Synthetic oligonucleotide
ccaaacugaacccagagaaua

SEQ ID NO: 232 - RNA, 21 nt, Artificial Sequence
  Description of Artificial Sequence: Synthetic oligonucleotide
ccaaacugaacccagagaaua

SEQ ID NO: 233 - RNA, 21 nt, Artificial Sequence
  Description of Artificial Sequence: Synthetic oligonucleotide
caaacugaacccagagaauca

SEQ ID NO: 234 - RNA, 21 nt, Artificial Sequence
  Description of Artificial Sequence: Synthetic oligonucleotide
uccguaagcagucagucgcca

SEQ ID NO: 235 - RNA, 21 nt, Artificial Sequence
  Description of Artificial Sequence: Synthetic oligonucleotide
uccguaagcagucagucgcca

SEQ ID NO: 236 - RNA, 21 nt, Artificial Sequence
  Description of Artificial Sequence: Synthetic oligonucleotide
uccguaagcagucagucgcca

SEQ ID NO: 237 - RNA, 21 nt, Artificial Sequence
  Description of Artificial Sequence: Synthetic oligonucleotide
uccguaagcagucagucgcca

SEQ ID NO: 238 - RNA, 21 nt, Artificial Sequence
  Description of Artificial Sequence: Synthetic oligonucleotide
uaagcagucagucgccaauga

SEQ ID NO: 239 - RNA, 21 nt, Artificial Sequence
  Description of Artificial Sequence: Synthetic oligonucleotide
cagucagucgccaaugccuua

SEQ ID NO: 240 - RNA, 21 nt, Artificial Sequence
  Description of Artificial Sequence: Synthetic oligonucleotide
ucagucgccaaugccuucaua

SEQ ID NO: 241 - RNA, 21 nt, Artificial Sequence
  Description of Artificial Sequence: Synthetic oligonucleotide
agucgccaaugccuucaucaa

SEQ ID NO: 242 - RNA, 21 nt, Artificial Sequence
  Description of Artificial Sequence: Synthetic oligonucleotide
gccaaugccuucaucaucuga

SEQ ID NO: 243 - RNA, 21 nt, Artificial Sequence
  Description of Artificial Sequence: Synthetic oligonucleotide
ccuucaucaucuguggcacca

SEQ ID NO: 244 - RNA, 21 nt, Artificial Sequence
  Description of Artificial Sequence: Synthetic oligonucleotide
ccuucaucaucuguggcacca

SEQ ID NO: 245 - RNA, 21 nt, Artificial Sequence
  Description of Artificial Sequence: Synthetic oligonucleotide
cuguggcaccuuguacaccga

SEQ ID NO: 246 - RNA, 21 nt, Artificial Sequence
  Description of Artificial Sequence: Synthetic oligonucleotide
cuaccgucaacuuugcuuaua

SEQ ID NO: 247 - RNA, 21 nt, Artificial Sequence
  Description of Artificial Sequence: Synthetic oligonucleotide
cuaccgucaacuuugcuuaua

SEQ ID NO: 248 - RNA, 21 nt, Artificial Sequence
  Description of Artificial Sequence: Synthetic oligonucleotide
uaccgucaacuuugcuuauga

SEQ ID NO: 249 - RNA, 21 nt, Artificial Sequence
  Description of Artificial Sequence: Synthetic oligonucleotide
uaccgucaacuuugcuuauga

SEQ ID NO: 250 - RNA, 21 nt, Artificial Sequence
  Description of Artificial Sequence: Synthetic oligonucleotide
uaccgucaacuuugcuuauga

SEQ ID NO: 251 - RNA, 21 nt, Artificial Sequence
  Description of Artificial Sequence: Synthetic oligonucleotide
uaccgucaacuuugcuuauga

SEQ ID NO: 252 - RNA, 21 nt, Artificial Sequence
  Description of Artificial Sequence: Synthetic oligonucleotide
uaccgucaacuuugcuuauga

SEQ ID NO: 253 - RNA, 21 nt, Artificial Sequence
  Description of Artificial Sequence: Synthetic oligonucleotide
uacccucaacuuugcuuauga

SEQ ID NO: 254 - RNA, 21 nt, Artificial Sequence
  Description of Artificial Sequence: Synthetic oligonucleotide
uacggucaacuuugcuuauga

SEQ ID NO: 255 - RNA, 21 nt, Artificial Sequence
  Description of Artificial Sequence: Synthetic oligonucleotide
uagcgucaacuuugcuuauga

SEQ ID NO: 256 - RNA, 21 nt, Artificial Sequence
  Description of Artificial Sequence: Synthetic oligonucleotide
uaccgucaacuuugcuuauga

SEQ ID NO: 257 - RNA, 21 nt, Artificial Sequence
  Description of Artificial Sequence: Synthetic oligonucleotide
uaccgucaacuuugcuuauga

SEQ ID NO: 258 - RNA, 21 nt, Artificial Sequence
  Description of Artificial Sequence: Synthetic oligonucleotide
accgucaacuuugcuuaugaa

SEQ ID NO: 259 - RNA, 21 nt, Artificial Sequence
  Description of Artificial Sequence: Synthetic oligonucleotide
accgucaacuuugcuuaugaa

SEQ ID NO: 260 - RNA, 19 nt, Artificial Sequence
  Description of Artificial Sequence: Synthetic oligonucleotide
ccgucaacuuugcuuauga

SEQ ID NO: 261 - RNA, 21 nt, Artificial Sequence
  Description of Artificial Sequence: Synthetic oligonucleotide
ccgucaacuuugcuuaugaca

SEQ ID NO: 262 - RNA, 21 nt, Artificial Sequence
  Description of Artificial Sequence: Synthetic oligonucleotide
cgucaacuuugcuuaugacaa

SEQ ID NO: 263 - RNA, 21 nt, Artificial Sequence
  Description of Artificial Sequence: Synthetic oligonucleotide
gucaacuuugcuuaugacaca

SEQ ID NO: 264 - RNA, 21 nt, Artificial Sequence
  Description of Artificial Sequence: Synthetic oligonucleotide
ucaacuuugcuuaugacacaa

SEQ ID NO: 265 - RNA, 21 nt, Artificial Sequence
  Description of Artificial Sequence: Synthetic oligonucleotide
ucaacuuugcuuaugacacaa

SEQ ID NO: 266 - RNA, 21 nt, Artificial Sequence
  Description of Artificial Sequence: Synthetic oligonucleotide
caacuuugcuuaugacacaga

SEQ ID NO: 267 - RNA, 21 nt, Artificial Sequence
  Description of Artificial Sequence: Synthetic oligonucleotide
aacuuugcuuaugacacagga

SEQ ID NO: 268 - RNA, 21 nt, Artificial Sequence
  Description of Artificial Sequence: Synthetic oligonucleotide
acuuugcuuaugacacaggca

SEQ ID NO: 269 - RNA, 21 nt, Artificial Sequence
  Description of Artificial Sequence: Synthetic oligonucleotide
cuuugcuuaugacacaggcaa

SEQ ID NO: 270 - RNA, 21 nt, Artificial Sequence
  Description of Artificial Sequence: Synthetic oligonucleotide
acaggcacagguaucagcaaa

SEQ ID NO: 271 - RNA, 21 nt, Artificial Sequence
  Description of Artificial Sequence: Synthetic oligonucleotide
auaaguacagcagcaugauua

SEQ ID NO: 272 - RNA, 21 nt, Artificial Sequence
  Description of Artificial Sequence: Synthetic oligonucleotide
uaaguacagcagcaugauuga

SEQ ID NO: 273 - RNA, 21 nt, Artificial Sequence
  Description of Artificial Sequence: Synthetic oligonucleotide
aaguacagcagcaugauugaa

SEQ ID NO: 274 - RNA, 21 nt, Artificial Sequence
  Description of Artificial Sequence: Synthetic oligonucleotide
aaguacagcagcaugauugaa

SEQ ID NO: 275 - RNA, 21 nt, Artificial Sequence
  Description of Artificial Sequence: Synthetic oligonucleotide
aaguacagcagcaugauugaa

SEQ ID NO: 276 - RNA, 21 nt, Artificial Sequence
  Description of Artificial Sequence: Synthetic oligonucleotide
aguacagcagcaugauugaca

SEQ ID NO: 277 - RNA, 21 nt, Artificial Sequence
  Description of Artificial Sequence: Synthetic oligonucleotide
aguacagcagcaugauugaca

SEQ ID NO: 278 - RNA, 21 nt, Artificial Sequence
  Description of Artificial Sequence: Synthetic oligonucleotide
guacagcagcaugauugacua

SEQ ID NO: 279 - RNA, 21 nt, Artificial Sequence
  Description of Artificial Sequence: Synthetic oligonucleotide
guacagcagcaugauugacua

SEQ ID NO: 280 - RNA, 21 nt, Artificial Sequence
  Description of Artificial Sequence: Synthetic oligonucleotide
guacagcagcaugauugacua

SEQ ID NO: 281 - RNA, 21 nt, Artificial Sequence
  Description of Artificial Sequence: Synthetic oligonucleotide
guacagcagcaugauugacua

SEQ ID NO: 282 - RNA, 21 nt, Artificial Sequence
  Description of Artificial Sequence: Synthetic oligonucleotide
guacagcagcaugauugacua

SEQ ID NO: 283 - RNA, 21 nt, Artificial Sequence
  Description of Artificial Sequence: Synthetic oligonucleotide
guacagcagcaugauugacua

SEQ ID NO: 284 - RNA, 21 nt, Artificial Sequence
  Description of Artificial Sequence: Synthetic oligonucleotide
guacugcagcaugauugacua

SEQ ID NO: 285 - RNA, 21 nt, Artificial Sequence
  Description of Artificial Sequence: Synthetic oligonucleotide
guagagcagcaugauugacua

SEQ ID NO: 286 - RNA, 21 nt, Artificial Sequence
  Description of Artificial Sequence: Synthetic oligonucleotide
guucagcagcaugauugacua

SEQ ID NO: 287 - RNA, 21 nt, Artificial Sequence
  Description of Artificial Sequence: Synthetic oligonucleotide
guacagcagcaugauugacua

SEQ ID NO: 288 - RNA, 21 nt, Artificial Sequence
  Description of Artificial Sequence: Synthetic oligonucleotide
uacagcagcaugauugacuaa

SEQ ID NO: 289 - RNA, 19 nt, Artificial Sequence
  Description of Artificial Sequence: Synthetic oligonucleotide
acagcagcaugauugacua

SEQ ID NO: 290 - RNA, 21 nt, Artificial Sequence
  Description of Artificial Sequence: Synthetic oligonucleotide
acagcagcaugauugacuaca

SEQ ID NO: 291 - RNA, 21 nt, Artificial Sequence
  Description of Artificial Sequence: Synthetic oligonucleotide
acagcagcaugauugacuaca

SEQ ID NO: 292 - RNA, 21 nt, Artificial Sequence
  Description of Artificial Sequence: Synthetic oligonucleotide
acagcagcaugauugacuaca

SEQ ID NO: 293 - RNA, 21 nt, Artificial Sequence
  Description of Artificial Sequence: Synthetic oligonucleotide
cagcagcaugauugacuacaa

SEQ ID NO: 294 - RNA, 21 nt, Artificial Sequence
  Description of Artificial Sequence: Synthetic oligonucleotide
agcagcaugauugacuacaaa

SEQ ID NO: 295 - RNA, 21 nt, Artificial Sequence
  Description of Artificial Sequence: Synthetic oligonucleotide
gcagcaugauugacuacaaca

SEQ ID NO: 296 - RNA, 21 nt, Artificial Sequence
  Description of Artificial Sequence: Synthetic oligonucleotide
cagcaugauugacuacaacca

SEQ ID NO: 297 - RNA, 21 nt, Artificial Sequence
  Description of Artificial Sequence: Synthetic oligonucleotide
gcaugauugacuacaacccca

SEQ ID NO: 298 - RNA, 21 nt, Artificial Sequence
  Description of Artificial Sequence: Synthetic oligonucleotide
agcucuuugccugggacaaca

SEQ ID NO: 299 - RNA, 21 nt, Artificial Sequence
  Description of Artificial Sequence: Synthetic oligonucleotide
agcucuuugccugggacaaca

SEQ ID NO: 300 - RNA, 21 nt, Artificial Sequence
  Description of Artificial Sequence: Synthetic oligonucleotide
gccugggacaacuugaacaua

SEQ ID NO: 301 - RNA, 21 nt, Artificial Sequence
  Description of Artificial Sequence: Synthetic oligonucleotide
gccugggacaacuugaacaua

SEQ ID NO: 302 - RNA, 21 nt, Artificial Sequence
  Description of Artificial Sequence: Synthetic oligonucleotide
gccugggacaacuugaacaua

SEQ ID NO: 303 - RNA, 21 nt, Artificial Sequence
  Description of Artificial Sequence: Synthetic oligonucleotide
cugggacaacuugaacaugga

SEQ ID NO: 304 - RNA, 21 nt, Artificial Sequence
  Description of Artificial Sequence: Synthetic oligonucleotide
ugggacaacuugaacauggua

SEQ ID NO: 305 - RNA, 21 nt, Artificial Sequence
  Description of Artificial Sequence: Synthetic oligonucleotide
gggacaacuugaacaugguca

SEQ ID NO: 306 - RNA, 21 nt, Artificial Sequence
  Description of Artificial Sequence: Synthetic oligonucleotide
gggacaacuugaacaugguca

SEQ ID NO: 307 - RNA, 21 nt, Artificial Sequence
  Description of Artificial Sequence: Synthetic oligonucleotide
ggacaacuugaacauggucaa

SEQ ID NO: 308 - RNA, 21 nt, Artificial Sequence
  Description of Artificial Sequence: Synthetic oligonucleotide
gacaacuugaacauggucaca

SEQ ID NO: 309 - RNA, 21 nt, Artificial Sequence
  Description of Artificial Sequence: Synthetic oligonucleotide
gacaacuugaacauggucaca

SEQ ID NO: 310 - RNA, 21 nt, Artificial Sequence
  Description of Artificial Sequence: Synthetic oligonucleotide
acaacuugaacauggucacua

SEQ ID NO: 311 - RNA, 21 nt, Artificial Sequence
  Description of Artificial Sequence: Synthetic oligonucleotide
acaacuugaacauggucacua

SEQ ID NO: 312 - RNA, 21 nt, Artificial Sequence
  Description of Artificial Sequence: Synthetic oligonucleotide
caacuugaacauggucacuua

SEQ ID NO: 313 - RNA, 21 nt, Artificial Sequence
  Description of Artificial Sequence: Synthetic oligonucleotide
aacuugaacauggucacuuaa

SEQ ID NO: 314 - RNA, 21 nt, Artificial Sequence
  Description of Artificial Sequence: Synthetic oligonucleotide
acuugaacauggucacuuaua

SEQ ID NO: 315 - RNA, 21 nt, Artificial Sequence
  Description of Artificial Sequence: Synthetic oligonucleotide
cuugaacauggucacuuauga

SEQ ID NO: 316 - RNA, 21 nt, Artificial Sequence
  Description of Artificial Sequence: Synthetic oligonucleotide
cuugaacauggucacuuauga

SEQ ID NO: 317 - RNA, 21 nt, Artificial Sequence
  Description of Artificial Sequence: Synthetic oligonucleotide
cuugaacauggucacuuauga

SEQ ID NO: 318 - RNA, 21 nt, Artificial Sequence
  Description of Artificial Sequence: Synthetic oligonucleotide
cuugaacauggucacuuauga

SEQ ID NO: 319 - RNA, 21 nt, Artificial Sequence
  Description of Artificial Sequence: Synthetic oligonucleotide
cuuguacauggucacuuauga

SEQ ID NO: 320 - RNA, 21 nt, Artificial Sequence
  Description of Artificial Sequence: Synthetic oligonucleotide
cuucaacauggucacuuauga

SEQ ID NO: 321 - RNA, 21 nt, Artificial Sequence
  Description of Artificial Sequence: Synthetic oligonucleotide
cuagaacauggucacuuauga

SEQ ID NO: 322 - RNA, 21 nt, Artificial Sequence
  Description of Artificial Sequence: Synthetic oligonucleotide
cuugaacauggucacuuauga

SEQ ID NO: 323 - RNA, 21 nt, Artificial Sequence
  Description of Artificial Sequence: Synthetic oligonucleotide
cuugaacauggucacuuauga

SEQ ID NO: 324 - RNA, 21 nt, Artificial Sequence
  Description of Artificial Sequence: Synthetic oligonucleotide
cuugaacauggucacuuauga

SEQ ID NO: 325 - RNA, 21 nt, Artificial Sequence
  Description of Artificial Sequence: Synthetic oligonucleotide
uugaacauggucacuuaugaa

SEQ ID NO: 326 - RNA, 21 nt, Artificial Sequence
  Description of Artificial Sequence: Synthetic oligonucleotide
uugaacauggucacuuaugaa

SEQ ID NO: 327 - RNA, 21 nt, Artificial Sequence
  Description of Artificial Sequence: Synthetic oligonucleotide
uugaacauggucacuuaugaa

SEQ ID NO: 328 - DNA, 21 bp, Artificial Sequence
  Description of Artificial Sequence: Synthetic oligonucleotide
  Description of Combined DNA/RNA Molecule: Synthetic oligonucleotide
uugaacauggucacuuaugaa

SEQ ID NO: 329 - RNA, 21 nt, Artificial Sequence
  Description of Artificial Sequence: Synthetic oligonucleotide
uugaucauggucacuuaugaa

SEQ ID NO: 330 - RNA, 21 nt, Artificial Sequence
  Description of Artificial Sequence: Synthetic oligonucleotide
uuguacauggucacuuaugaa

SEQ ID NO: 331 - RNA, 21 nt, Artificial Sequence
  Description of Artificial Sequence: Synthetic oligonucleotide
uucaacauggucacuuaugaa

SEQ ID NO: 332 - RNA, 21 nt, Artificial Sequence
  Description of Artificial Sequence: Synthetic oligonucleotide
uugaacauggucacuuaugaa

SEQ ID NO: 333 - RNA, 21 nt, Artificial Sequence
  Description of Artificial Sequence: Synthetic oligonucleotide
uugaacauggucacuuaugaa

SEQ ID NO: 334 - RNA, 19 nt, Artificial Sequence
  Description of Artificial Sequence: Synthetic oligonucleotide
ugaacauggucacuuauga

SEQ ID NO: 335 - RNA, 21 nt, Artificial Sequence
  Description of Artificial Sequence: Synthetic oligonucleotide
ugaacauggucacuuaugaca

SEQ ID NO: 336 - RNA, 19 nt, Artificial Sequence
  Description of Artificial Sequence: Synthetic oligonucleotide
gaacauggucacuuaugaa

SEQ ID NO: 337 - RNA, 21 nt, Artificial Sequence
  Description of Artificial Sequence: Synthetic oligonucleotide
gaacauggucacuuaugacaa

SEQ ID NO: 338 - RNA, 21 nt, Artificial Sequence
  Description of Artificial Sequence: Synthetic oligonucleotide
aacauggucacuuaugacaua

SEQ ID NO: 339 - RNA, 21 nt, Artificial Sequence
  Description of Artificial Sequence: Synthetic oligonucleotide
acauggucacuuaugacauca

SEQ ID NO: 340 - RNA, 21 nt, Artificial Sequence
  Description of Artificial Sequence: Synthetic oligonucleotide
acauggucacuuaugacauca

SEQ ID NO: 341 - RNA, 21 nt, Artificial Sequence
  Description of Artificial Sequence: Synthetic oligonucleotide
acauggucacuuaugacauca

SEQ ID NO: 342 - RNA, 21 nt, Artificial Sequence
  Description of Artificial Sequence: Synthetic oligonucleotide
cauggucacuuaugacaucaa

SEQ ID NO: 343 - RNA, 21 nt, Artificial Sequence
  Description of Artificial Sequence: Synthetic oligonucleotide
auggucacuuaugacaucaaa

SEQ ID NO: 344 - RNA, 21 nt, Artificial Sequence
  Description of Artificial Sequence: Synthetic oligonucleotide
uggucacuuaugacaucaaga

SEQ ID NO: 345 - RNA, 21 nt, Artificial Sequence
  Description of Artificial Sequence: Synthetic oligonucleotide
ggucacuuaugacaucaagca

SEQ ID NO: 346 - RNA, 21 nt, Artificial Sequence
  Description of Artificial Sequence: Synthetic oligonucleotide
gucacuuaugacaucaagcua

SEQ ID NO: 347 - RNA, 21 nt, Artificial Sequence
  Description of Artificial Sequence: Synthetic oligonucleotide
gcagaaggagaugcucaggga

SEQ ID NO: 348 - RNA, 21 nt, Artificial Sequence
  Description of Artificial Sequence: Synthetic oligonucleotide
aagggagagccagccagccaa

SEQ ID NO: 349 - RNA, 21 nt, Artificial Sequence
  Description of Artificial Sequence: Synthetic oligonucleotide
gaugaacauggucaccaucua

SEQ ID NO: 350 - RNA, 21 nt, Artificial Sequence
  Description of Artificial Sequence: Synthetic oligonucleotide
gcauuuaugggauguuuaaua

SEQ ID NO: 351 - RNA, 21 nt, Artificial Sequence
  Description of Artificial Sequence: Synthetic oligonucleotide
uguuuaaugacauaguucaaa

SEQ ID NO: 352 - RNA, 21 nt, Artificial Sequence
  Description of Artificial Sequence: Synthetic oligonucleotide
uguuuaaugacauaguucaaa

SEQ ID NO: 353 - RNA, 21 nt, Artificial Sequence
  Description of Artificial Sequence: Synthetic oligonucleotide
uguuuaaugacauaguucaaa

SEQ ID NO: 354 - RNA, 21 nt, Artificial Sequence
  Description of Artificial Sequence: Synthetic oligonucleotide
guuuaaugacauaguucaaga

SEQ ID NO: 355 - RNA, 21 nt, Artificial Sequence
  Description of Artificial Sequence: Synthetic oligonucleotide
guuuaaugacauaguucaaga

SEQ ID NO: 356 - RNA, 21 nt, Artificial Sequence
  Description of Artificial Sequence: Synthetic oligonucleotide
uuuaaugacauaguucaagua

SEQ ID NO: 357 - RNA, 21 nt, Artificial Sequence
  Description of Artificial Sequence: Synthetic oligonucleotide
uuaaugacauaguucaaguua

SEQ ID NO: 358 - RNA, 21 nt, Artificial Sequence
  Description of Artificial Sequence: Synthetic oligonucleotide
uaaugacauaguucaaguuua

SEQ ID NO: 359 - RNA, 21 nt, Artificial Sequence
  Description of Artificial Sequence: Synthetic oligonucleotide
uaaugacauaguucaaguuua

SEQ ID NO: 360 - RNA, 21 nt, Artificial Sequence
  Description of Artificial Sequence: Synthetic oligonucleotide
aaugacauaguucaaguuuua

SEQ ID NO: 361 - RNA, 21 nt, Artificial Sequence
  Description of Artificial Sequence: Synthetic oligonucleotide
aaugacauaguucaaguuuua

SEQ ID NO: 362 - RNA, 21 nt, Artificial Sequence
  Description of Artificial Sequence: Synthetic oligonucleotide
augacauaguucaaguuuuca

SEQ ID NO: 363 - RNA, 21 nt, Artificial Sequence
  Description of Artificial Sequence: Synthetic oligonucleotide
ugacauaguucaaguuuucua

SEQ ID NO: 364 - RNA, 21 nt, Artificial Sequence
  Description of Artificial Sequence: Synthetic oligonucleotide
gacauaguucaaguuuucuua

SEQ ID NO: 365 - RNA, 21 nt, Artificial Sequence
  Description of Artificial Sequence: Synthetic oligonucleotide
acauaguucaaguuuucuuga

SEQ ID NO: 366 - RNA, 21 nt, Artificial Sequence
  Description of Artificial Sequence: Synthetic oligonucleotide
acauaguucaaguuuucuuga

SEQ ID NO: 367 - RNA, 21 nt, Artificial Sequence
  Description of Artificial Sequence: Synthetic oligonucleotide
acauaguucaaguuuucuuga

SEQ ID NO: 368 - RNA, 21 nt, Artificial Sequence
  Description of Artificial Sequence: Synthetic oligonucleotide
acauaguucaaguuuucuuga

SEQ ID NO: 369 - RNA, 21 nt, Artificial Sequence
  Description of Artificial Sequence: Synthetic oligonucleotide
acauuguucaaguuuucuuga

SEQ ID NO: 370 - RNA, 21 nt, Artificial Sequence
  Description of Artificial Sequence: Synthetic oligonucleotide
acaaaguucaaguuuucuuga

SEQ ID NO: 371 - RNA, 21 nt, Artificial Sequence
  Description of Artificial Sequence: Synthetic oligonucleotide
acuuaguucaaguuuucuuga

SEQ ID NO: 372 - RNA, 21 nt, Artificial Sequence
  Description of Artificial Sequence: Synthetic oligonucleotide
acauaguucaaguuuucuuga

SEQ ID NO: 373 - RNA, 21 nt, Artificial Sequence
  Description of Artificial Sequence: Synthetic oligonucleotide
cauaguucaaguuuucuugua

SEQ ID NO: 374 - RNA, 19 nt, Artificial Sequence
  Description of Artificial Sequence: Synthetic oligonucleotide
auaguucaaguuuucuuga

SEQ ID NO: 375 - RNA, 19 nt, Artificial Sequence
  Description of Artificial Sequence: Synthetic oligonucleotide
auaguucaaguuuucuuga

SEQ ID NO: 376 - RNA, 21 nt, Artificial Sequence
  Description of Artificial Sequence: Synthetic oligonucleotide
auaguucaaguuuucuuguga

SEQ ID NO: 377 - RNA, 21 nt, Artificial Sequence
  Description of Artificial Sequence: Synthetic oligonucleotide
uaguucaaguuuucuugugaa

SEQ ID NO: 378 - RNA, 21 nt, Artificial Sequence
  Description of Artificial Sequence: Synthetic oligonucleotide
uaguucaaguuuucuugugaa

SEQ ID NO: 379 - RNA, 21 nt, Artificial Sequence
  Description of Artificial Sequence: Synthetic oligonucleotide
aguucaaguuuucuugugaua

SEQ ID NO: 380 - RNA, 21 nt, Artificial Sequence
  Description of Artificial Sequence: Synthetic oligonucleotide
aguucaaguuuucuugugaua

SEQ ID NO: 381 - RNA, 21 nt, Artificial Sequence
  Description of Artificial Sequence: Synthetic oligonucleotide
guucaaguuuucuugugauua

SEQ ID NO: 382 - RNA, 21 nt, Artificial Sequence
  Description of Artificial Sequence: Synthetic oligonucleotide
guucaaguuuucuugugauua

SEQ ID NO: 383 - RNA, 21 nt, Artificial Sequence
  Description of Artificial Sequence: Synthetic oligonucleotide
uucaaguuuucuugugauuua

SEQ ID NO: 384 - RNA, 21 nt, Artificial Sequence
  Description of Artificial Sequence: Synthetic oligonucleotide
ucaaguuuucuugugauuuga

SEQ ID NO: 385 - RNA, 21 nt, Artificial Sequence
  Description of Artificial Sequence: Synthetic oligonucleotide
ucaaguuuucuugugauuuga

SEQ ID NO: 386 - RNA, 21 nt, Artificial Sequence
  Description of Artificial Sequence: Synthetic oligonucleotide
ucaaguuuucuugugauuuga

SEQ ID NO: 387 - RNA, 21 nt, Artificial Sequence
  Description of Artificial Sequence: Synthetic oligonucleotide
ucaaguuuucuugugauuuga

SEQ ID NO: 388 - RNA, 21 nt, Artificial Sequence
  Description of Artificial Sequence: Synthetic oligonucleotide
caaguuuucuugugauuugga

SEQ ID NO: 389 - RNA, 21 nt, Artificial Sequence
  Description of Artificial Sequence: Synthetic oligonucleotide
aaguuuucuugugauuuggga

SEQ ID NO: 390 - RNA, 21 nt, Artificial Sequence
  Description of Artificial Sequence: Synthetic oligonucleotide
ugaaaaccauugcucuugcaa

SEQ ID NO: 391 - RNA, 21 nt, Artificial Sequence
  Description of Artificial Sequence: Synthetic oligonucleotide
gaaaaccauugcucuugcaua

SEQ ID NO: 392 - RNA, 21 nt, Artificial Sequence
  Description of Artificial Sequence: Synthetic oligonucleotide
gaaaaccauugcucuugcaua

SEQ ID NO: 393 - RNA, 21 nt, Artificial Sequence
  Description of Artificial Sequence: Synthetic oligonucleotide
aaaaccauugcucuugcauga

SEQ ID NO: 394 - RNA, 21 nt, Artificial Sequence
  Description of Artificial Sequence: Synthetic oligonucleotide
aaaaccauugcucuugcauga

SEQ ID NO: 395 - RNA, 21 nt, Artificial Sequence
  Description of Artificial Sequence: Synthetic oligonucleotide
aaaccauugcucuugcaugua

SEQ ID NO: 396 - RNA, 21 nt, Artificial Sequence
  Description of Artificial Sequence: Synthetic oligonucleotide
aaaccauugcucuugcaugua

SEQ ID NO: 397 - RNA, 21 nt, Artificial Sequence
  Description of Artificial Sequence: Synthetic oligonucleotide
aaccauugcucuugcauguua

SEQ ID NO: 398 - RNA, 21 nt, Artificial Sequence
  Description of Artificial Sequence: Synthetic oligonucleotide
accauugcucuugcauguuaa

SEQ ID NO: 399 - RNA, 21 nt, Artificial Sequence
  Description of Artificial Sequence: Synthetic oligonucleotide
ccauugcucuugcauguuaca

SEQ ID NO: 400 - RNA, 21 nt, Artificial Sequence
  Description of Artificial Sequence: Synthetic oligonucleotide
cauugcucuugcauguuacaa

SEQ ID NO: 401 - RNA, 21 nt, Artificial Sequence
  Description of Artificial Sequence: Synthetic oligonucleotide
cauugcucuugcauguuacaa

SEQ ID NO: 402 - RNA, 21 nt, Artificial Sequence
  Description of Artificial Sequence: Synthetic oligonucleotide
auugcucuugcauguuacaua

SEQ ID NO: 403 - RNA, 21 nt, Artificial Sequence
  Description of Artificial Sequence: Synthetic oligonucleotide
uugcucuugcauguuacauga

SEQ ID NO: 404 - RNA, 21 nt, Artificial Sequence
  Description of Artificial Sequence: Synthetic oligonucleotide
uugcucuugcauguuacauga

SEQ ID NO: 405 - RNA, 21 nt, Artificial Sequence
  Description of Artificial Sequence: Synthetic oligonucleotide
uugcacuugcauguuacauga

SEQ ID NO: 406 - RNA, 21 nt, Artificial Sequence
  Description of Artificial Sequence: Synthetic oligonucleotide
uuggucuugcauguuacauga

SEQ ID NO: 407 - RNA, 21 nt, Artificial Sequence
  Description of Artificial Sequence: Synthetic oligonucleotide
uuccucuugcauguuacauga

SEQ ID NO: 408 - DNA, 21 bp, Artificial Sequence
  Description of Artificial Sequence: Synthetic oligonucleotide
  Description of Combined DNA/RNA Molecule: Synthetic oligonucleotide
uugcucuugcauguuacauga

SEQ ID NO: 409 - RNA, 21 nt, Artificial Sequence
  Description of Artificial Sequence: Synthetic oligonucleotide
uugcucuugcauguuacauga

SEQ ID NO: 410 - RNA, 21 nt, Artificial Sequence
  Description of Artificial Sequence: Synthetic oligonucleotide
uugcucuugcauguuacauga

SEQ ID NO: 411 - RNA, 21 nt, Artificial Sequence
  Description of Artificial Sequence: Synthetic oligonucleotide
ugcucuugcauguuacaugga

SEQ ID NO: 412 - RNA, 19 nt, Artificial Sequence
  Description of Artificial Sequence: Synthetic oligonucleotide
gcucuugcauguuacauga

SEQ ID NO: 413 - RNA, 21 nt, Artificial Sequence
  Description of Artificial Sequence: Synthetic oligonucleotide
gcucuugcauguuacauggua

SEQ ID NO: 414 - RNA, 21 nt, Artificial Sequence
  Description of Artificial Sequence: Synthetic oligonucleotide
cucuugcauguuacaugguua

SEQ ID NO: 415 - RNA, 21 nt, Artificial Sequence
  Description of Artificial Sequence: Synthetic oligonucleotide
cucuugcauguuacaugguua

SEQ ID NO: 416 - RNA, 21 nt, Artificial Sequence
  Description of Artificial Sequence: Synthetic oligonucleotide
ucuugcauguuacaugguuaa

SEQ ID NO: 417 - RNA, 21 nt, Artificial Sequence
  Description of Artificial Sequence: Synthetic oligonucleotide
cuugcauguuacaugguuaca

SEQ ID NO: 418 - RNA, 21 nt, Artificial Sequence
  Description of Artificial Sequence: Synthetic oligonucleotide
cuugcauguuacaugguuaca

SEQ ID NO: 419 - RNA, 21 nt, Artificial Sequence
  Description of Artificial Sequence: Synthetic oligonucleotide
uugcauguuacaugguuacca

SEQ ID NO: 420 - RNA, 21 nt, Artificial Sequence
  Description of Artificial Sequence: Synthetic oligonucleotide
uugcauguuacaugguuacca

SEQ ID NO: 421 - RNA, 21 nt, Artificial Sequence
  Description of Artificial Sequence: Synthetic oligonucleotide
uugcauguuacaugguuacca

SEQ ID NO: 422 - RNA, 21 nt, Artificial Sequence
  Description of Artificial Sequence: Synthetic oligonucleotide
ugcauguuacaugguuaccaa

SEQ ID NO: 423 - RNA, 21 nt, Artificial Sequence
  Description of Artificial Sequence: Synthetic oligonucleotide
gcauguuacaugguuaccaca

SEQ ID NO: 424 - RNA, 21 nt, Artificial Sequence
  Description of Artificial Sequence: Synthetic oligonucleotide
gcauguuacaugguuaccaca

SEQ ID NO: 425 - RNA, 21 nt, Artificial Sequence
  Description of Artificial Sequence: Synthetic oligonucleotide
cauguuacaugguuaccacaa

SEQ ID NO: 426 - RNA, 21 nt, Artificial Sequence
  Description of Artificial Sequence: Synthetic oligonucleotide
auguuacaugguuaccacaaa

SEQ ID NO: 427 - RNA, 21 nt, Artificial Sequence
  Description of Artificial Sequence: Synthetic oligonucleotide
uguuacaugguuaccacaaga

SEQ ID NO: 428 - RNA, 21 nt, Artificial Sequence
  Description of Artificial Sequence: Synthetic oligonucleotide
cuccucuggccagcaucgaaa

SEQ ID NO: 429 - RNA, 21 nt, Artificial Sequence
  Description of Artificial Sequence: Synthetic oligonucleotide
auauaaguaagaugcauuuaa

SEQ ID NO: 430 - RNA, 21 nt, Artificial Sequence
  Description of Artificial Sequence: Synthetic oligonucleotide
uauaaguaagaugcauuuaca

SEQ ID NO: 431 - RNA, 21 nt, Artificial Sequence
  Description of Artificial Sequence: Synthetic oligonucleotide
auaaguaagaugcauuuacua

SEQ ID NO: 432 - RNA, 21 nt, Artificial Sequence
  Description of Artificial Sequence: Synthetic oligonucleotide
uaaguaagaugcauuuacuaa

SEQ ID NO: 433 - RNA, 21 nt, Artificial Sequence
  Description of Artificial Sequence: Synthetic oligonucleotide
aaguaagaugcauuuacuaca

SEQ ID NO: 434 - RNA, 21 nt, Artificial Sequence
  Description of Artificial Sequence: Synthetic oligonucleotide
aaguaagaugcauuuacuaca

SEQ ID NO: 435 - RNA, 21 nt, Artificial Sequence
  Description of Artificial Sequence: Synthetic oligonucleotide
aaguaagaugcauuuacuaca

SEQ ID NO: 436 - RNA, 21 nt, Artificial Sequence
  Description of Artificial Sequence: Synthetic oligonucleotide
aaguaagaugcauuuacuaca

SEQ ID NO: 437 - RNA, 21 nt, Artificial Sequence
  Description of Artificial Sequence: Synthetic oligonucleotide
aaguaagaugcauuuacuaca

SEQ ID NO: 438 - DNA, 21 bp, Artificial Sequence
  Description of Artificial Sequence: Synthetic oligonucleotide
  Description of Combined DNA/RNA Molecule: Synthetic oligonucleotide
aaguaagatgcauuuacuaca

SEQ ID NO: 439 - RNA, 21 nt, Artificial Sequence
  Description of Artificial Sequence: Synthetic oligonucleotide
aaguaagaugcauuuacuaca

SEQ ID NO: 440 - RNA, 21 nt, Artificial Sequence
  Description of Artificial Sequence: Synthetic oligonucleotide
aaguuagaugcauuuacuaca

SEQ ID NO: 441 - RNA, 21 nt, Artificial Sequence
  Description of Artificial Sequence: Synthetic oligonucleotide
aagaaagaugcauuuacuaca

SEQ ID NO: 442 - RNA, 21 nt, Artificial Sequence
  Description of Artificial Sequence: Synthetic oligonucleotide
aacuaagaugcauuuacuaca

SEQ ID NO: 443 - RNA, 21 nt, Artificial Sequence
  Description of Artificial Sequence: Synthetic oligonucleotide
aaguaagaugcauuuacuaca

SEQ ID NO: 444 - RNA, 21 nt, Artificial Sequence
  Description of Artificial Sequence: Synthetic oligonucleotide
aaguaagaugcauuuacuaca

SEQ ID NO: 445 - RNA, 21 nt, Artificial Sequence
  Description of Artificial Sequence: Synthetic oligonucleotide
aguaagaugcauuuacuacaa

SEQ ID NO: 446 - RNA, 19 nt, Artificial Sequence
  Description of Artificial Sequence: Synthetic oligonucleotide
guaagaugcauuuacuaca

SEQ ID NO: 447 - RNA, 21 nt, Artificial Sequence
  Description of Artificial Sequence: Synthetic oligonucleotide
uuggcuucuaaugcuucagaa

SEQ ID NO: 448 - RNA, 21 nt, Artificial Sequence
  Description of Artificial Sequence: Synthetic oligonucleotide
cuucuaaugcuucagauagaa

SEQ ID NO: 449 - RNA, 21 nt, Artificial Sequence
  Description of Artificial Sequence: Synthetic oligonucleotide
cuucuaaugcuucagauagaa

SEQ ID NO: 450 - RNA, 21 nt, Artificial Sequence
  Description of Artificial Sequence: Synthetic oligonucleotide
cuucuaaugcuucagauagaa

SEQ ID NO: 451 - DNA, 23 bp, Artificial Sequence
  Description of Artificial Sequence: Synthetic oligonucleotide
  Description of Combined DNA/RNA Molecule: Synthetic oligonucleotide
uaagctcugcugugcugagaggu

SEQ ID NO: 452 - DNA, 23 bp, Artificial Sequence
  Description of Artificial Sequence: Synthetic oligonucleotide
  Description of Combined DNA/RNA Molecule: Synthetic oligonucleotide
uaagctctgcugugcugagaggu

SEQ ID NO: 453 - DNA, 23 bp, Artificial Sequence
  Description of Artificial Sequence: Synthetic oligonucleotide
  Description of Combined DNA/RNA Molecule: Synthetic oligonucleotide
uaagcucugcugugcugagaggu

SEQ ID NO: 454 - DNA, 23 bp, Artificial Sequence
  Description of Artificial Sequence: Synthetic oligonucleotide
  Description of Combined DNA/RNA Molecule: Synthetic oligonucleotide
uaaagctcugcugugcugagagg

SEQ ID NO: 455 - DNA, 23 bp, Artificial Sequence
  Description of Artificial Sequence: Synthetic oligonucleotide
  Description of Combined DNA/RNA Molecule: Synthetic oligonucleotide
uucctctggaaagcucugcugug

SEQ ID NO: 456 - DNA, 23 bp, Artificial Sequence
  Description of Artificial Sequence: Synthetic oligonucleotide
  Description of Combined DNA/RNA Molecule: Synthetic oligonucleotide
ugugcacagaagaaccucauugc

SEQ ID NO: 457 - DNA, 23 bp, Artificial Sequence
  Description of Artificial Sequence: Synthetic oligonucleotide
  Description of Combined DNA/RNA Molecule: Synthetic oligonucleotide
ugugcacagaagaaccucauugc

SEQ ID NO: 458 - DNA, 23 bp, Artificial Sequence
  Description of Artificial Sequence: Synthetic oligonucleotide
  Description of Combined DNA/RNA Molecule: Synthetic oligonucleotide
ucgugcacagaagaaccucauug

SEQ ID NO: 459 - DNA, 23 bp, Artificial Sequence
  Description of Artificial Sequence: Synthetic oligonucleotide
  Description of Combined DNA/RNA Molecule: Synthetic oligonucleotide
uacgugcacagaagaaccucauu

SEQ ID NO: 460 - DNA, 23 bp, Artificial Sequence
  Description of Artificial Sequence: Synthetic oligonucleotide
  Description of Combined DNA/RNA Molecule: Synthetic oligonucleotide
uacgtgcacagaagaaccucauu

SEQ ID NO: 461 - DNA, 23 bp, Artificial Sequence
  Description of Artificial Sequence: Synthetic oligonucleotide
  Description of Combined DNA/RNA Molecule: Synthetic oligonucleotide
uaacgugcacagaagaaccucau

SEQ ID NO: 462 - RNA, 23 nt, Artificial Sequence
  Description of Artificial Sequence: Synthetic oligonucleotide
ucaacgugcacagaagaaccuca

SEQ ID NO: 463 - DNA, 23 bp, Artificial Sequence
  Description of Artificial Sequence: Synthetic oligonucleotide
  Description of Combined DNA/RNA Molecule: Synthetic oligonucleotide
ucaacgtgcacagaagaaccucg

SEQ ID NO: 464 - DNA, 23 bp, Artificial Sequence
  Description of Artificial Sequence: Synthetic oligonucleotide
  Description of Combined DNA/RNA Molecule: Synthetic oligonucleotide
ucaacgtgcacagaagaaccucg

SEQ ID NO: 465 - DNA, 23 bp, Artificial Sequence
  Description of Artificial Sequence: Synthetic oligonucleotide
  Description of Combined DNA/RNA Molecule: Synthetic oligonucleotide
ucaacgtgcacagaagaaccucg

SEQ ID NO: 466 - DNA, 23 bp, Artificial Sequence
  Description of Artificial Sequence: Synthetic oligonucleotide
  Description of Combined DNA/RNA Molecule: Synthetic oligonucleotide
ucaacgtgcacagaaguaccucg

SEQ ID NO: 467 - DNA, 23 bp, Artificial Sequence
  Description of Artificial Sequence: Synthetic oligonucleotide
  Description of Combined DNA/RNA Molecule: Synthetic oligonucleotide
ucaacgtgcacagaagauccucg

SEQ ID NO: 468 - DNA, 23 bp, Artificial Sequence
  Description of Artificial Sequence: Synthetic oligonucleotide
  Description of Combined DNA/RNA Molecule: Synthetic oligonucleotide
ucaacgtgcacagaagaagcucg

SEQ ID NO: 469 - DNA, 23 bp, Artificial Sequence
  Description of Artificial Sequence: Synthetic oligonucleotide
  Description of Combined DNA/RNA Molecule: Synthetic oligonucleotide
ucaacgtgcacagaagaaccuca

SEQ ID NO: 470 - DNA, 23 bp, Artificial Sequence
  Description of Artificial Sequence: Synthetic oligonucleotide
  Description of Combined DNA/RNA Molecule: Synthetic oligonucleotide
ugcaacgugcacagaagaaccuc

SEQ ID NO: 471 - DNA, 23 bp, Artificial Sequence
  Description of Artificial Sequence: Synthetic oligonucleotide
  Description of Combined DNA/RNA Molecule: Synthetic oligonucleotide
ugcaacgugcacagaagaaccuc

SEQ ID NO: 472 - DNA, 21 bp, Artificial Sequence
  Description of Artificial Sequence: Synthetic oligonucleotide
  Description of Combined DNA/RNA Molecule: Synthetic oligonucleotide
ucaacgtgcacagaagaaccu

SEQ ID NO: 473 - DNA, 23 bp, Artificial Sequence
  Description of Artificial Sequence: Synthetic oligonucleotide
  Description of Combined DNA/RNA Molecule: Synthetic oligonucleotide
uagcaacgugcacagaagaaccu

SEQ ID NO: 474 - DNA, 23 bp, Artificial Sequence
  Description of Artificial Sequence: Synthetic oligonucleotide
  Description of Combined DNA/RNA Molecule: Synthetic oligonucleotide
ucagcaacgugcacagaagaacc

SEQ ID NO: 475 - DNA, 23 bp, Artificial Sequence
  Description of Artificial Sequence: Synthetic oligonucleotide
  Description of Combined DNA/RNA Molecule: Synthetic oligonucleotide
ugcagcaacgugcacagaagaac

SEQ ID NO: 476 - DNA, 23 bp, Artificial Sequence
  Description of Artificial Sequence: Synthetic oligonucleotide
  Description of Combined DNA/RNA Molecule: Synthetic oligonucleotide
ugcagcaacgugcacagaagaac

SEQ ID NO: 477 - DNA, 23 bp, Artificial Sequence
  Description of Artificial Sequence: Synthetic oligonucleotide
  Description of Combined DNA/RNA Molecule: Synthetic oligonucleotide
uugcagcaacgugcacagaagaa

SEQ ID NO: 478 - DNA, 23 bp, Artificial Sequence
  Description of Artificial Sequence: Synthetic oligonucleotide
  Description of Combined DNA/RNA Molecule: Synthetic oligonucleotide
uugcagcaacgugcacagaagaa

SEQ ID NO: 479 - DNA, 23 bp, Artificial Sequence
  Description of Artificial Sequence: Synthetic oligonucleotide
  Description of Combined DNA/RNA Molecule: Synthetic oligonucleotide
ucugcagcaacgugcacagaaga

SEQ ID NO: 480 - DNA, 23 bp, Artificial Sequence
  Description of Artificial Sequence: Synthetic oligonucleotide
  Description of Combined DNA/RNA Molecule: Synthetic oligonucleotide
ugcugcagcaacgugcacagaag

SEQ ID NO: 481 - DNA, 23 bp, Artificial Sequence
  Description of Artificial Sequence: Synthetic oligonucleotide
  Description of Combined DNA/RNA Molecule: Synthetic oligonucleotide
uagcugcagcaacgugcacagaa

SEQ ID NO: 482 - DNA, 23 bp, Artificial Sequence
  Description of Artificial Sequence: Synthetic oligonucleotide
  Description of Combined DNA/RNA Molecule: Synthetic oligonucleotide
uagctgcagcaacgugcacagaa

SEQ ID NO: 483 - DNA, 23 bp, Artificial Sequence
  Description of Artificial Sequence: Synthetic oligonucleotide
  Description of Combined DNA/RNA Molecule: Synthetic oligonucleotide
uaagcugcagcaacgugcacaga

SEQ ID NO: 484 - DNA, 23 bp, Artificial Sequence
  Description of Artificial Sequence: Synthetic oligonucleotide
  Description of Combined DNA/RNA Molecule: Synthetic oligonucleotide
uaaagctgcagcaacgugcacag

SEQ ID NO: 485 - DNA, 23 bp, Artificial Sequence
  Description of Artificial Sequence: Synthetic oligonucleotide
  Description of Combined DNA/RNA Molecule: Synthetic oligonucleotide
uccaaagcugcagcaacgugcac

SEQ ID NO: 486 - DNA, 23 bp, Artificial Sequence
  Description of Artificial Sequence: Synthetic oligonucleotide
  Description of Combined DNA/RNA Molecule: Synthetic oligonucleotide
ucccaaagcugcagcaacgugca

SEQ ID NO: 487 - DNA, 23 bp, Artificial Sequence
  Description of Artificial Sequence: Synthetic oligonucleotide
  Description of Combined DNA/RNA Molecule: Synthetic oligonucleotide
uagctggacagcuggcaucucag

SEQ ID NO: 488 - DNA, 23 bp, Artificial Sequence
  Description of Artificial Sequence: Synthetic oligonucleotide
  Description of Combined DNA/RNA Molecule: Synthetic oligonucleotide
ugcagctggacagcuggcaucuc

SEQ ID NO: 489 - DNA, 23 bp, Artificial Sequence
  Description of Artificial Sequence: Synthetic oligonucleotide
  Description of Combined DNA/RNA Molecule: Synthetic oligonucleotide
ucagaagcagcagcuggacagcu

SEQ ID NO: 490 - DNA, 23 bp, Artificial Sequence
  Description of Artificial Sequence: Synthetic oligonucleotide
  Description of Combined DNA/RNA Molecule: Synthetic oligonucleotide
uaggccagaagcagcagcuggac

SEQ ID NO: 491 - DNA, 23 bp, Artificial Sequence
  Description of Artificial Sequence: Synthetic oligonucleotide
  Description of Combined DNA/RNA Molecule: Synthetic oligonucleotide
uucccacaccaggcaggccagaa

SEQ ID NO: 492 - DNA, 23 bp, Artificial Sequence
  Description of Artificial Sequence: Synthetic oligonucleotide
  Description of Combined DNA/RNA Molecule: Synthetic oligonucleotide
uucccacaccaggcaggccagaa

SEQ ID NO: 493 - DNA, 23 bp, Artificial Sequence
  Description of Artificial Sequence: Synthetic oligonucleotide
  Description of Combined DNA/RNA Molecule: Synthetic oligonucleotide
uucccacaccaggcaggccagaa

SEQ ID NO: 494 - DNA, 23 bp, Artificial Sequence
  Description of Artificial Sequence: Synthetic oligonucleotide
  Description of Combined DNA/RNA Molecule: Synthetic oligonucleotide
uaucccacaccaggcaggccaga

SEQ ID NO: 495 - DNA, 23 bp, Artificial Sequence
  Description of Artificial Sequence: Synthetic oligonucleotide
  Description of Combined DNA/RNA Molecule: Synthetic oligonucleotide
uacatcacacaccaggcaggcca

SEQ ID NO: 496 - DNA, 23 bp, Artificial Sequence
  Description of Artificial Sequence: Synthetic oligonucleotide
  Description of Combined DNA/RNA Molecule: Synthetic oligonucleotide
uacatcccacaccaggcaggcca

SEQ ID NO: 497 - DNA, 23 bp, Artificial Sequence
  Description of Artificial Sequence: Synthetic oligonucleotide
  Description of Combined DNA/RNA Molecule: Synthetic oligonucleotide
uauacuggcaucggccacucugg

SEQ ID NO: 498 - DNA, 23 bp, Artificial Sequence
  Description of Artificial Sequence: Synthetic oligonucleotide
  Description of Combined DNA/RNA Molecule: Synthetic oligonucleotide
uucatugggacuggccacacuga

SEQ ID NO: 499 - DNA, 23 bp, Artificial Sequence
  Description of Artificial Sequence: Synthetic oligonucleotide
  Description of Combined DNA/RNA Molecule: Synthetic oligonucleotide
uuucautgggacuggccacacug

SEQ ID NO: 500 - DNA, 23 bp, Artificial Sequence
  Description of Artificial Sequence: Synthetic oligonucleotide
  Description of Combined DNA/RNA Molecule: Synthetic oligonucleotide
utucautgggacuggccacacug

SEQ ID NO: 501 - DNA, 23 bp, Artificial Sequence
  Description of Artificial Sequence: Synthetic oligonucleotide
  Description of Combined DNA/RNA Molecule: Synthetic oligonucleotide
ugatgacugacauggccuggcuc

SEQ ID NO: 502 - DNA, 23 bp, Artificial Sequence
  Description of Artificial Sequence: Synthetic oligonucleotide
  Description of Combined DNA/RNA Molecule: Synthetic oligonucleotide
ugaugactgacauggccuggcuc

SEQ ID NO: 503 - DNA, 23 bp, Artificial Sequence
  Description of Artificial Sequence: Synthetic oligonucleotide
  Description of Combined DNA/RNA Molecule: Synthetic oligonucleotide
ugaugacugacauggccuggcuc

SEQ ID NO: 504 - DNA, 23 bp, Artificial Sequence
  Description of Artificial Sequence: Synthetic oligonucleotide
  Description of Combined DNA/RNA Molecule: Synthetic oligonucleotide
uuauggaugacugacauggccug

SEQ ID NO: 505 - DNA, 23 bp, Artificial Sequence
  Description of Artificial Sequence: Synthetic oligonucleotide
  Description of Combined DNA/RNA Molecule: Synthetic oligonucleotide
ugcutugguggccuccaggucua

SEQ ID NO: 506 - DNA, 23 bp, Artificial Sequence
  Description of Artificial Sequence: Synthetic oligonucleotide
  Description of Combined DNA/RNA Molecule: Synthetic oligonucleotide
ucgagctuugguggccuccaggu

SEQ ID NO: 507 - DNA, 23 bp, Artificial Sequence
  Description of Artificial Sequence: Synthetic oligonucleotide
  Description of Combined DNA/RNA Molecule: Synthetic oligonucleotide
uaactctcugguuuggguuucca

SEQ ID NO: 508 - DNA, 23 bp, Artificial Sequence
  Description of Artificial Sequence: Synthetic oligonucleotide
  Description of Combined DNA/RNA Molecule: Synthetic oligonucleotide
uugtctcggaggagguugcugua

SEQ ID NO: 509 - DNA, 23 bp, Artificial Sequence
  Description of Artificial Sequence: Synthetic oligonucleotide
  Description of Combined DNA/RNA Molecule: Synthetic oligonucleotide
uugucucggaggagguugcugua

SEQ ID NO: 510 - DNA, 23 bp, Artificial Sequence
  Description of Artificial Sequence: Synthetic oligonucleotide
  Description of Combined DNA/RNA Molecule: Synthetic oligonucleotide
ucutgtcucggaggagguugcug

SEQ ID NO: 511 - DNA, 23 bp, Artificial Sequence
  Description of Artificial Sequence: Synthetic oligonucleotide
  Description of Combined DNA/RNA Molecule: Synthetic oligonucleotide
ucuugtctcggaggagguugcug

SEQ ID NO: 512 - DNA, 23 bp, Artificial Sequence
  Description of Artificial Sequence: Synthetic oligonucleotide
  Description of Combined DNA/RNA Molecule: Synthetic oligonucleotide
ucuugucucggaggagguugcug

SEQ ID NO: 513 - DNA, 23 bp, Artificial Sequence
  Description of Artificial Sequence: Synthetic oligonucleotide
  Description of Combined DNA/RNA Molecule: Synthetic oligonucleotide
uccuccagaactgacuugucucg

SEQ ID NO: 514 - DNA, 23 bp, Artificial Sequence
  Description of Artificial Sequence: Synthetic oligonucleotide
  Description of Combined DNA/RNA Molecule: Synthetic oligonucleotide
ucuucctccagaacugacuuguc

SEQ ID NO: 515 - DNA, 23 bp, Artificial Sequence
  Description of Artificial Sequence: Synthetic oligonucleotide
  Description of Combined DNA/RNA Molecule: Synthetic oligonucleotide
uucucutccuccagaacugacuu

SEQ ID NO: 516 - DNA, 23 bp, Artificial Sequence
  Description of Artificial Sequence: Synthetic oligonucleotide
  Description of Combined DNA/RNA Molecule: Synthetic oligonucleotide
ucaacctccuggccagauucuca

SEQ ID NO: 517 - DNA, 23 bp, Artificial Sequence
  Description of Artificial Sequence: Synthetic oligonucleotide
  Description of Combined DNA/RNA Molecule: Synthetic oligonucleotide
ugctutccaaccuccuggccaga

SEQ ID NO: 518 - DNA, 23 bp, Artificial Sequence
  Description of Artificial Sequence: Synthetic oligonucleotide
  Description of Combined DNA/RNA Molecule: Synthetic oligonucleotide
ugcutuccaaccuccuggccaga

SEQ ID NO: 519 - DNA, 23 bp, Artificial Sequence
  Description of Artificial Sequence: Synthetic oligonucleotide
  Description of Combined DNA/RNA Molecule: Synthetic oligonucleotide
ugcctugcuaccuccuggcugcu

SEQ ID NO: 520 - DNA, 23 bp, Artificial Sequence
  Description of Artificial Sequence: Synthetic oligonucleotide
  Description of Combined DNA/RNA Molecule: Synthetic oligonucleotide
uuuctctggagccugguggcaca

SEQ ID NO: 521 - DNA, 23 bp, Artificial Sequence
  Description of Artificial Sequence: Synthetic oligonucleotide
  Description of Combined DNA/RNA Molecule: Synthetic oligonucleotide
uaaggccaaaguguccaaauucc

SEQ ID NO: 522 - DNA, 23 bp, Artificial Sequence
  Description of Artificial Sequence: Synthetic oligonucleotide
  Description of Combined DNA/RNA Molecule: Synthetic oligonucleotide
uaaggccaaaguguccaaauucc

SEQ ID NO: 523 - DNA, 23 bp, Artificial Sequence
  Description of Artificial Sequence: Synthetic oligonucleotide
  Description of Combined DNA/RNA Molecule: Synthetic oligonucleotide
uuuccuggaaggccaaagugucc

SEQ ID NO: 524 - DNA, 23 bp, Artificial Sequence
  Description of Artificial Sequence: Synthetic oligonucleotide
  Description of Combined DNA/RNA Molecule: Synthetic oligonucleotide
ucagtuccuggaaggccaaagug

SEQ ID NO: 525 - DNA, 23 bp, Artificial Sequence
  Description of Artificial Sequence: Synthetic oligonucleotide
  Description of Combined DNA/RNA Molecule: Synthetic oligonucleotide
uuagcucggacuucaguuccugg

SEQ ID NO: 526 - DNA, 23 bp, Artificial Sequence
  Description of Artificial Sequence: Synthetic oligonucleotide
  Description of Combined DNA/RNA Molecule: Synthetic oligonucleotide
uuagctcggacuucaguuccugg

SEQ ID NO: 527 - DNA, 23 bp, Artificial Sequence
  Description of Artificial Sequence: Synthetic oligonucleotide
  Description of Combined DNA/RNA Molecule: Synthetic oligonucleotide
ucuucaguuagcucggacuucag

SEQ ID NO: 528 - DNA, 23 bp, Artificial Sequence
  Description of Artificial Sequence: Synthetic oligonucleotide
  Description of Combined DNA/RNA Molecule: Synthetic oligonucleotide
uaagcaggaacuucaguuagcuc

SEQ ID NO: 529 - DNA, 23 bp, Artificial Sequence
  Description of Artificial Sequence: Synthetic oligonucleotide
  Description of Combined DNA/RNA Molecule: Synthetic oligonucleotide
ugaagcaggaacuucaguuagcu

SEQ ID NO: 530 - DNA, 23 bp, Artificial Sequence
  Description of Artificial Sequence: Synthetic oligonucleotide
  Description of Combined DNA/RNA Molecule: Synthetic oligonucleotide
uauucgggaagcaggaacuucag

SEQ ID NO: 531 - DNA, 23 bp, Artificial Sequence
  Description of Artificial Sequence: Synthetic oligonucleotide
  Description of Combined DNA/RNA Molecule: Synthetic oligonucleotide
uucctacccaaacuaguucucca

SEQ ID NO: 532 - DNA, 23 bp, Artificial Sequence
  Description of Artificial Sequence: Synthetic oligonucleotide
  Description of Combined DNA/RNA Molecule: Synthetic oligonucleotide
uuccuacccaaacuaguucucca

SEQ ID NO: 533 - DNA, 23 bp, Artificial Sequence
  Description of Artificial Sequence: Synthetic oligonucleotide
  Description of Combined DNA/RNA Molecule: Synthetic oligonucleotide
ugcucuccuacccaaacuaguuc

SEQ ID NO: 534 - DNA, 22 bp, Artificial Sequence
  Description of Artificial Sequence: Synthetic oligonucleotide
  Description of Combined DNA/RNA Molecule: Synthetic oligonucleotide
ugctctcuacccaaacuaguuc

SEQ ID NO: 535 - DNA, 23 bp, Artificial Sequence
  Description of Artificial Sequence: Synthetic oligonucleotide
  Description of Combined DNA/RNA Molecule: Synthetic oligonucleotide
ucgugagaggcucuccuacccaa

SEQ ID NO: 536 - DNA, 23 bp, Artificial Sequence
  Description of Artificial Sequence: Synthetic oligonucleotide
  Description of Combined DNA/RNA Molecule: Synthetic oligonucleotide
uagcgugagaggcucuccuaccc

SEQ ID NO: 537 - DNA, 23 bp, Artificial Sequence
  Description of Artificial Sequence: Synthetic oligonucleotide
  Description of Combined DNA/RNA Molecule: Synthetic oligonucleotide
uagcgugagaggcucuccuaccc

SEQ ID NO: 538 - DNA, 23 bp, Artificial Sequence
  Description of Artificial Sequence: Synthetic oligonucleotide
  Description of Combined DNA/RNA Molecule: Synthetic oligonucleotide
ucagcgtgagaggcucuccuacc

SEQ ID NO: 539 - DNA, 23 bp, Artificial Sequence
  Description of Artificial Sequence: Synthetic oligonucleotide
  Description of Combined DNA/RNA Molecule: Synthetic oligonucleotide
uucagcgugagaggcucuccuac

SEQ ID NO: 540 - DNA, 23 bp, Artificial Sequence
  Description of Artificial Sequence: Synthetic oligonucleotide
  Description of Combined DNA/RNA Molecule: Synthetic oligonucleotide
ucugtucucagcgugagaggcuc

SEQ ID NO: 541 - DNA, 23 bp, Artificial Sequence
  Description of Artificial Sequence: Synthetic oligonucleotide
  Description of Combined DNA/RNA Molecule: Synthetic oligonucleotide
ucugutcucagcgugagaggcuc

SEQ ID NO: 542 - DNA, 23 bp, Artificial Sequence
  Description of Artificial Sequence: Synthetic oligonucleotide
  Description of Combined DNA/RNA Molecule: Synthetic oligonucleotide
ucugutctcagcgugagaggcuc

SEQ ID NO: 543 - DNA, 23 bp, Artificial Sequence
  Description of Artificial Sequence: Synthetic oligonucleotide
  Description of Combined DNA/RNA Molecule: Synthetic oligonucleotide
uuuucugcuguucucagcgugag

SEQ ID NO: 544 - DNA, 23 bp, Artificial Sequence
  Description of Artificial Sequence: Synthetic oligonucleotide
  Description of Combined DNA/RNA Molecule: Synthetic oligonucleotide
uguutctgcuguucucagcguga

SEQ ID NO: 545 - DNA, 23 bp, Artificial Sequence
  Description of Artificial Sequence: Synthetic oligonucleotide
  Description of Combined DNA/RNA Molecule: Synthetic oligonucleotide
uugutucugcuguucucagcgug

SEQ ID NO: 546 - DNA, 23 bp, Artificial Sequence
  Description of Artificial Sequence: Synthetic oligonucleotide
  Description of Combined DNA/RNA Molecule: Synthetic oligonucleotide
uugtutcugcuguucucagcgug

SEQ ID NO: 547 - DNA, 23 bp, Artificial Sequence
  Description of Artificial Sequence: Synthetic oligonucleotide
  Description of Combined DNA/RNA Molecule: Synthetic oligonucleotide
uuugtutcugcuguucucagcgu

SEQ ID NO: 548 - DNA, 23 bp, Artificial Sequence
  Description of Artificial Sequence: Synthetic oligonucleotide
  Description of Combined DNA/RNA Molecule: Synthetic oligonucleotide
uauugutucugcuguucucagcg

SEQ ID NO: 549 - DNA, 23 bp, Artificial Sequence
  Description of Artificial Sequence: Synthetic oligonucleotide
  Description of Combined DNA/RNA Molecule: Synthetic oligonucleotide
uaautgtuucugcuguucucagc

SEQ ID NO: 550 - DNA, 23 bp, Artificial Sequence
  Description of Artificial Sequence: Synthetic oligonucleotide
  Description of Combined DNA/RNA Molecule: Synthetic oligonucleotide
uuaatuguuucugcuguucucag

SEQ ID NO: 551 - DNA, 23 bp, Artificial Sequence
  Description of Artificial Sequence: Synthetic oligonucleotide
  Description of Combined DNA/RNA Molecule: Synthetic oligonucleotide
uguaautguuucugcuguucuca

SEQ ID NO: 552 - DNA, 23 bp, Artificial Sequence
  Description of Artificial Sequence: Synthetic oligonucleotide
  Description of Combined DNA/RNA Molecule: Synthetic oligonucleotide
uguaautguuucugcuguucuca

SEQ ID NO: 553 - DNA, 23 bp, Artificial Sequence
  Description of Artificial Sequence: Synthetic oligonucleotide
  Description of Combined DNA/RNA Molecule: Synthetic oligonucleotide
uaguaatuguutcugcuguucuc

SEQ ID NO: 554 - DNA, 23 bp, Artificial Sequence
  Description of Artificial Sequence: Synthetic oligonucleotide
  Description of Combined DNA/RNA Molecule: Synthetic oligonucleotide
ucagtaauuguuucugcuguucu

SEQ ID NO: 555 - DNA, 23 bp, Artificial Sequence
  Description of Artificial Sequence: Synthetic oligonucleotide
  Description of Combined DNA/RNA Molecule: Synthetic oligonucleotide
ucagtaauuguuucugcuguucu

SEQ ID NO: 556 - DNA, 23 bp, Artificial Sequence
  Description of Artificial Sequence: Synthetic oligonucleotide
  Description of Combined DNA/RNA Molecule: Synthetic oligonucleotide
ucagtaauugutucugguguucu

SEQ ID NO: 557 - DNA, 23 bp, Artificial Sequence
  Description of Artificial Sequence: Synthetic oligonucleotide
  Description of Combined DNA/RNA Molecule: Synthetic oligonucleotide
ucagtaauugutucugcaguucu

SEQ ID NO: 558 - DNA, 23 bp, Artificial Sequence
  Description of Artificial Sequence: Synthetic oligonucleotide
  Description of Combined DNA/RNA Molecule: Synthetic oligonucleotide
ucagtaauugutucugcucuucu

SEQ ID NO: 559 - RNA, 23 nt, Artificial Sequence
  Description of Artificial Sequence: Synthetic oligonucleotide
ucaguaauuguuucugcuguucu

SEQ ID NO: 560 - DNA, 23 bp, Artificial Sequence
  Description of Artificial Sequence: Synthetic oligonucleotide
  Description of Combined DNA/RNA Molecule: Synthetic oligonucleotide
ucagtaauugutucugcuguucu

SEQ ID NO: 561 - DNA, 23 bp, Artificial Sequence
  Description of Artificial Sequence: Synthetic oligonucleotide
  Description of Combined DNA/RNA Molecule: Synthetic oligonucleotide
ucagtaauugutucugcuguucu

SEQ ID NO: 562 - DNA, 23 bp, Artificial Sequence
  Description of Artificial Sequence: Synthetic oligonucleotide
  Description of Combined DNA/RNA Molecule: Synthetic oligonucleotide
uccaguaauugtuucugcuguuc

SEQ ID NO: 563 - DNA, 21 bp, Artificial Sequence
  Description of Artificial Sequence: Synthetic oligonucleotide
  Description of Combined DNA/RNA Molecule: Synthetic oligonucleotide
ucagtaauugutucugcuguu

SEQ ID NO: 564 - DNA, 23 bp, Artificial Sequence
  Description of Artificial Sequence: Synthetic oligonucleotide
  Description of Combined DNA/RNA Molecule: Synthetic oligonucleotide
ugccagtaauuguuucugcuguu

SEQ ID NO: 565 - DNA, 23 bp, Artificial Sequence
  Description of Artificial Sequence: Synthetic oligonucleotide
  Description of Combined DNA/RNA Molecule: Synthetic oligonucleotide
uugccaguaauuguuucugcugu

SEQ ID NO: 566 - DNA, 23 bp, Artificial Sequence
  Description of Artificial Sequence: Synthetic oligonucleotide
  Description of Combined DNA/RNA Molecule: Synthetic oligonucleotide
uuugccaguaauuguuucugcug

SEQ ID NO: 567 - DNA, 23 bp, Artificial Sequence
  Description of Artificial Sequence: Synthetic oligonucleotide
  Description of Combined DNA/RNA Molecule: Synthetic oligonucleotide
ucuugccaguaauuguuucugcu

SEQ ID NO: 568 - DNA, 23 bp, Artificial Sequence
  Description of Artificial Sequence: Synthetic oligonucleotide
  Description of Combined DNA/RNA Molecule: Synthetic oligonucleotide
ucuugccaguaauuguuucugcu

SEQ ID NO: 569 - DNA, 23 bp, Artificial Sequence
  Description of Artificial Sequence: Synthetic oligonucleotide
  Description of Combined DNA/RNA Molecule: Synthetic oligonucleotide
uacutgacaguaauuguuucugc

SEQ ID NO: 570 - DNA, 23 bp, Artificial Sequence
  Description of Artificial Sequence: Synthetic oligonucleotide
  Description of Combined DNA/RNA Molecule: Synthetic oligonucleotide
uuactugccaguaauuguuucug

SEQ ID NO: 571 - DNA, 23 bp, Artificial Sequence
  Description of Artificial Sequence: Synthetic oligonucleotide
  Description of Combined DNA/RNA Molecule: Synthetic oligonucleotide
uauacutgccaguaauuguuucu

SEQ ID NO: 572 - DNA, 23 bp, Artificial Sequence
  Description of Artificial Sequence: Synthetic oligonucleotide
  Description of Combined DNA/RNA Molecule: Synthetic oligonucleotide
ucauactugccaguaauuguuuc

SEQ ID NO: 573 - DNA, 23 bp, Artificial Sequence
  Description of Artificial Sequence: Synthetic oligonucleotide
  Description of Combined DNA/RNA Molecule: Synthetic oligonucleotide
ucauactugccaguaauuguuuc

SEQ ID NO: 574 - DNA, 23 bp, Artificial Sequence
  Description of Artificial Sequence: Synthetic oligonucleotide
  Description of Combined DNA/RNA Molecule: Synthetic oligonucleotide
uauccacacaccauacuugccag

SEQ ID NO: 575 - DNA, 23 bp, Artificial Sequence
  Description of Artificial Sequence: Synthetic oligonucleotide
  Description of Combined DNA/RNA Molecule: Synthetic oligonucleotide
uauccacacaccauacuugccag

SEQ ID NO: 576 - DNA, 23 bp, Artificial Sequence
  Description of Artificial Sequence: Synthetic oligonucleotide
  Description of Combined DNA/RNA Molecule: Synthetic oligonucleotide
uauccacacaccauacuugccag

SEQ ID NO: 577 - DNA, 23 bp, Artificial Sequence
  Description of Artificial Sequence: Synthetic oligonucleotide
  Description of Combined DNA/RNA Molecule: Synthetic oligonucleotide
ugcatccacacaccauacuugcc

SEQ ID NO: 578 - DNA, 23 bp, Artificial Sequence
  Description of Artificial Sequence: Synthetic oligonucleotide
  Description of Combined DNA/RNA Molecule: Synthetic oligonucleotide
ugcauccacacaccauacuugcc

SEQ ID NO: 579 - DNA, 23 bp, Artificial Sequence
  Description of Artificial Sequence: Synthetic oligonucleotide
  Description of Combined DNA/RNA Molecule: Synthetic oligonucleotide
uggctgaugaggucauacucaaa

SEQ ID NO: 580 - DNA, 23 bp, Artificial Sequence
  Description of Artificial Sequence: Synthetic oligonucleotide
  Description of Combined DNA/RNA Molecule: Synthetic oligonucleotide
uuggcugaugaggucauacucaa

SEQ ID NO: 581 - DNA, 23 bp, Artificial Sequence
  Description of Artificial Sequence: Synthetic oligonucleotide
  Description of Combined DNA/RNA Molecule: Synthetic oligonucleotide
ucuggctgaugaggucauacuca

SEQ ID NO: 582 - DNA, 23 bp, Artificial Sequence
  Description of Artificial Sequence: Synthetic oligonucleotide
  Description of Combined DNA/RNA Molecule: Synthetic oligonucleotide
uacuggcugaugaggucauacuc

SEQ ID NO: 583 - DNA, 23 bp, Artificial Sequence
  Description of Artificial Sequence: Synthetic oligonucleotide
  Description of Combined DNA/RNA Molecule: Synthetic oligonucleotide
uacuggctgaugaggucauacuc

SEQ ID NO: 584 - DNA, 23 bp, Artificial Sequence
  Description of Artificial Sequence: Synthetic oligonucleotide
  Description of Combined DNA/RNA Molecule: Synthetic oligonucleotide
uaactggcugaugaggucauacu

SEQ ID NO: 585 - DNA, 23 bp, Artificial Sequence
  Description of Artificial Sequence: Synthetic oligonucleotide
  Description of Combined DNA/RNA Molecule: Synthetic oligonucleotide
uaaacuggcugaugaggucauac

SEQ ID NO: 586 - DNA, 23 bp, Artificial Sequence
  Description of Artificial Sequence: Synthetic oligonucleotide
  Description of Combined DNA/RNA Molecule: Synthetic oligonucleotide
uuaaactggcugaugaggucaua

SEQ ID NO: 587 - DNA, 23 bp, Artificial Sequence
  Description of Artificial Sequence: Synthetic oligonucleotide
  Description of Combined DNA/RNA Molecule: Synthetic oligonucleotide
uauaaacuggctgaugaggucau

SEQ ID NO: 588 - DNA, 23 bp, Artificial Sequence
  Description of Artificial Sequence: Synthetic oligonucleotide
  Description of Combined DNA/RNA Molecule: Synthetic oligonucleotide
ucauaaacuggcugaugagguca

SEQ ID NO: 589 - RNA, 23 nt, Artificial Sequence
  Description of Artificial Sequence: Synthetic oligonucleotide
ugcauaaacuggcugaugagguc

SEQ ID NO: 590 - DNA, 23 bp, Artificial Sequence
  Description of Artificial Sequence: Synthetic oligonucleotide
  Description of Combined DNA/RNA Molecule: Synthetic oligonucleotide
ugcataaacuggcugaugagguc

SEQ ID NO: 591 - DNA, 23 bp, Artificial Sequence
  Description of Artificial Sequence: Synthetic oligonucleotide
  Description of Combined DNA/RNA Molecule: Synthetic oligonucleotide
ugcataaacuggcugaugagguc

SEQ ID NO: 592 - DNA, 23 bp, Artificial Sequence
  Description of Artificial Sequence: Synthetic oligonucleotide
  Description of Combined DNA/RNA Molecule: Synthetic oligonucleotide
ugcataaacuggcugaugagguc

SEQ ID NO: 593 - DNA, 23 bp, Artificial Sequence
  Description of Artificial Sequence: Synthetic oligonucleotide
  Description of Combined DNA/RNA Molecule: Synthetic oligonucleotide
ugcataaacuggcugaugagguc

SEQ ID NO: 594 - DNA, 23 bp, Artificial Sequence
  Description of Artificial Sequence: Synthetic oligonucleotide
  Description of Combined DNA/RNA Molecule: Synthetic oligonucleotide
ugcataaacuggcugaugagguc

SEQ ID NO: 595 - DNA, 23 bp, Artificial Sequence
  Description of Artificial Sequence: Synthetic oligonucleotide
  Description of Combined DNA/RNA Molecule: Synthetic oligonucleotide
ugcataaacuggcugaugagguc

SEQ ID NO: 596 - DNA, 23 bp, Artificial Sequence
  Description of Artificial Sequence: Synthetic oligonucleotide
  Description of Combined DNA/RNA Molecule: Synthetic oligonucleotide
ugcataaacuggcugaagagguc

SEQ ID NO: 597 - DNA, 23 bp, Artificial Sequence
  Description of Artificial Sequence: Synthetic oligonucleotide
  Description of Combined DNA/RNA Molecule: Synthetic oligonucleotide
ugcataaacuggcugaucagguc

SEQ ID NO: 598 - DNA, 23 bp, Artificial Sequence
  Description of Artificial Sequence: Synthetic oligonucleotide
  Description of Combined DNA/RNA Molecule: Synthetic oligonucleotide
ugcataaacuggcugaugugguc

SEQ ID NO: 599 - DNA, 23 bp, Artificial Sequence
  Description of Artificial Sequence: Synthetic oligonucleotide
  Description of Combined DNA/RNA Molecule: Synthetic oligonucleotide
ugcataaacuggcugaugagguc

SEQ ID NO: 600 - DNA, 23 bp, Artificial Sequence
  Description of Artificial Sequence: Synthetic oligonucleotide
  Description of Combined DNA/RNA Molecule: Synthetic oligonucleotide
utgcauaaacuggcugaugaggu

SEQ ID NO: 601 - DNA, 21 bp, Artificial Sequence
  Description of Artificial Sequence: Synthetic oligonucleotide
  Description of Combined DNA/RNA Molecule: Synthetic oligonucleotide
ugcataaacuggcugaugagg

SEQ ID NO: 602 - DNA, 23 bp, Artificial Sequence
  Description of Artificial Sequence: Synthetic oligonucleotide
  Description of Combined DNA/RNA Molecule: Synthetic oligonucleotide
ucugcataaacuggcugaugagg

SEQ ID NO: 603 - DNA, 23 bp, Artificial Sequence
  Description of Artificial Sequence: Synthetic oligonucleotide
  Description of Combined DNA/RNA Molecule: Synthetic oligonucleotide
ucugcataaactggcugaugagg

SEQ ID NO: 604 - DNA, 23 bp, Artificial Sequence
  Description of Artificial Sequence: Synthetic oligonucleotide
  Description of Combined DNA/RNA Molecule: Synthetic oligonucleotide
uccugcauaaacuggcugaugag

SEQ ID NO: 605 - DNA, 23 bp, Artificial Sequence
  Description of Artificial Sequence: Synthetic oligonucleotide
  Description of Combined DNA/RNA Molecule: Synthetic oligonucleotide
uccctgcauaaacuggcugauga

SEQ ID NO: 606 - DNA, 23 bp, Artificial Sequence
  Description of Artificial Sequence: Synthetic oligonucleotide
  Description of Combined DNA/RNA Molecule: Synthetic oligonucleotide
ucccugcauaaacuggcugauga

SEQ ID NO: 607 - DNA, 23 bp, Artificial Sequence
  Description of Artificial Sequence: Synthetic oligonucleotide
  Description of Combined DNA/RNA Molecule: Synthetic oligonucleotide
ugcccugcauaaacuggcugaug

SEQ ID NO: 608 - DNA, 23 bp, Artificial Sequence
  Description of Artificial Sequence: Synthetic oligonucleotide
  Description of Combined DNA/RNA Molecule: Synthetic oligonucleotide
uagccctgcauaaacuggcugau

SEQ ID NO: 609 - DNA, 23 bp, Artificial Sequence
  Description of Artificial Sequence: Synthetic oligonucleotide
  Description of Combined DNA/RNA Molecule: Synthetic oligonucleotide
uuagcccugcauaaacuggcuga

SEQ ID NO: 610 - DNA, 23 bp, Artificial Sequence
  Description of Artificial Sequence: Synthetic oligonucleotide
  Description of Combined DNA/RNA Molecule: Synthetic oligonucleotide
uuagccctgcauaaacuggcuga

SEQ ID NO: 611 - DNA, 23 bp, Artificial Sequence
  Description of Artificial Sequence: Synthetic oligonucleotide
  Description of Combined DNA/RNA Molecule: Synthetic oligonucleotide
uguagcccugcauaaacuggcug

SEQ ID NO: 612 - DNA, 23 bp, Artificial Sequence
  Description of Artificial Sequence: Synthetic oligonucleotide
  Description of Combined DNA/RNA Molecule: Synthetic oligonucleotide
uguagcacugcauaaacuggcug

SEQ ID NO: 613 - DNA, 23 bp, Artificial Sequence
  Description of Artificial Sequence: Synthetic oligonucleotide
  Description of Combined DNA/RNA Molecule: Synthetic oligonucleotide
ugguagcccugcauaaacuggcu

SEQ ID NO: 614 - DNA, 23 bp, Artificial Sequence
  Description of Artificial Sequence: Synthetic oligonucleotide
  Description of Combined DNA/RNA Molecule: Synthetic oligonucleotide
ugguagaccugcauaaacuggcu

SEQ ID NO: 615 - DNA, 23 bp, Artificial Sequence
  Description of Artificial Sequence: Synthetic oligonucleotide
  Description of Combined DNA/RNA Molecule: Synthetic oligonucleotide
ucuuagaagggtagcccugcaua

SEQ ID NO: 616 - DNA, 23 bp, Artificial Sequence
  Description of Artificial Sequence: Synthetic oligonucleotide
  Description of Combined DNA/RNA Molecule: Synthetic oligonucleotide
uccgagtacaccacagcacccgu

SEQ ID NO: 617 - DNA, 23 bp, Artificial Sequence
  Description of Artificial Sequence: Synthetic oligonucleotide
  Description of Combined DNA/RNA Molecule: Synthetic oligonucleotide
uccgagtacaccacagcacccgu

SEQ ID NO: 618 - DNA, 23 bp, Artificial Sequence
  Description of Artificial Sequence: Synthetic oligonucleotide
  Description of Combined DNA/RNA Molecule: Synthetic oligonucleotide
ucgccctggaaauagaggcuccc

SEQ ID NO: 619 - DNA, 23 bp, Artificial Sequence
  Description of Artificial Sequence: Synthetic oligonucleotide
  Description of Combined DNA/RNA Molecule: Synthetic oligonucleotide
ucgccctggaaauagaggcuccc

SEQ ID NO: 620 - DNA, 23 bp, Artificial Sequence
  Description of Artificial Sequence: Synthetic oligonucleotide
  Description of Combined DNA/RNA Molecule: Synthetic oligonucleotide
ucagcgcccuggaaauagaggcu

SEQ ID NO: 621 - DNA, 23 bp, Artificial Sequence
  Description of Artificial Sequence: Synthetic oligonucleotide
  Description of Combined DNA/RNA Molecule: Synthetic oligonucleotide
ucuggacucagcgcccuggaaau

SEQ ID NO: 622 - DNA, 23 bp, Artificial Sequence
  Description of Artificial Sequence: Synthetic oligonucleotide
  Description of Combined DNA/RNA Molecule: Synthetic oligonucleotide
ucuggacucagcgcccuggaaau

SEQ ID NO: 623 - DNA, 23 bp, Artificial Sequence
  Description of Artificial Sequence: Synthetic oligonucleotide
  Description of Combined DNA/RNA Molecule: Synthetic oligonucleotide
ucuggactcagcgcccuggaaau

SEQ ID NO: 624 - DNA, 23 bp, Artificial Sequence
  Description of Artificial Sequence: Synthetic oligonucleotide
  Description of Combined DNA/RNA Molecule: Synthetic oligonucleotide
uagutctggacucagcgcccugg

SEQ ID NO: 625 - DNA, 23 bp, Artificial Sequence
  Description of Artificial Sequence: Synthetic oligonucleotide
  Description of Combined DNA/RNA Molecule: Synthetic oligonucleotide
ucagtucuggacucagcgcccug

SEQ ID NO: 626 - DNA, 23 bp, Artificial Sequence
  Description of Artificial Sequence: Synthetic oligonucleotide
  Description of Combined DNA/RNA Molecule: Synthetic oligonucleotide
ucagutcuggacucagcgcccug

SEQ ID NO: 627 - DNA, 23 bp, Artificial Sequence
  Description of Artificial Sequence: Synthetic oligonucleotide
  Description of Combined DNA/RNA Molecule: Synthetic oligonucleotide
ucagtucuggacucagcgcccug

SEQ ID NO: 628 - DNA, 23 bp, Artificial Sequence
  Description of Artificial Sequence: Synthetic oligonucleotide
  Description of Combined DNA/RNA Molecule: Synthetic oligonucleotide
uacagutcuggacucagcgcccu

SEQ ID NO: 629 - DNA, 23 bp, Artificial Sequence
  Description of Artificial Sequence: Synthetic oligonucleotide
  Description of Combined DNA/RNA Molecule: Synthetic oligonucleotide
ugacagtucuggacucagcgccc

SEQ ID NO: 630 - DNA, 23 bp, Artificial Sequence
  Description of Artificial Sequence: Synthetic oligonucleotide
  Description of Combined DNA/RNA Molecule: Synthetic oligonucleotide
uugacaguucuggacucagcgcc

SEQ ID NO: 631 - DNA, 23 bp, Artificial Sequence
  Description of Artificial Sequence: Synthetic oligonucleotide
  Description of Combined DNA/RNA Molecule: Synthetic oligonucleotide
uaugacaguucuggacucagcgc

SEQ ID NO: 632 - DNA, 23 bp, Artificial Sequence
  Description of Artificial Sequence: Synthetic oligonucleotide
  Description of Combined DNA/RNA Molecule: Synthetic oligonucleotide
uuaugacaguucuggacucagcg

SEQ ID NO: 633 - DNA, 23 bp, Artificial Sequence
  Description of Artificial Sequence: Synthetic oligonucleotide
  Description of Combined DNA/RNA Molecule: Synthetic oligonucleotide
uuatgacaguucuggacucagcg

SEQ ID NO: 634 - DNA, 23 bp, Artificial Sequence
  Description of Artificial Sequence: Synthetic oligonucleotide
  Description of Combined DNA/RNA Molecule: Synthetic oligonucleotide
uuaugacaguucuggacucagcg

SEQ ID NO: 635 - DNA, 23 bp, Artificial Sequence
  Description of Artificial Sequence: Synthetic oligonucleotide
  Description of Combined DNA/RNA Molecule: Synthetic oligonucleotide
uuuatgacaguucuggacucagc

SEQ ID NO: 636 - DNA, 23 bp, Artificial Sequence
  Description of Artificial Sequence: Synthetic oligonucleotide
  Description of Combined DNA/RNA Molecule: Synthetic oligonucleotide
ucuuaugacaguucuggacucag

SEQ ID NO: 637 - DNA, 23 bp, Artificial Sequence
  Description of Artificial Sequence: Synthetic oligonucleotide
  Description of Combined DNA/RNA Molecule: Synthetic oligonucleotide
ucuuaugacagtucuggacucag

SEQ ID NO: 638 - DNA, 23 bp, Artificial Sequence
  Description of Artificial Sequence: Synthetic oligonucleotide
  Description of Combined DNA/RNA Molecule: Synthetic oligonucleotide
uucutatgacaguucuggacuca

SEQ ID NO: 639 - DNA, 23 bp, Artificial Sequence
  Description of Artificial Sequence: Synthetic oligonucleotide
  Description of Combined DNA/RNA Molecule: Synthetic oligonucleotide
utcutatgacaguucuggacuca

SEQ ID NO: 640 - RNA, 23 nt, Artificial Sequence
  Description of Artificial Sequence: Synthetic oligonucleotide
uaucuuaugacaguucuggacuc

SEQ ID NO: 641 - DNA, 23 bp, Artificial Sequence
  Description of Artificial Sequence: Synthetic oligonucleotide
  Description of Combined DNA/RNA Molecule: Synthetic oligonucleotide
uauctuaugacaguucuggacuc

SEQ ID NO: 642 - DNA, 23 bp, Artificial Sequence
  Description of Artificial Sequence: Synthetic oligonucleotide
  Description of Combined DNA/RNA Molecule: Synthetic oligonucleotide
uauctuaugacaguucuggacuc

SEQ ID NO: 643 - DNA, 23 bp, Artificial Sequence
  Description of Artificial Sequence: Synthetic oligonucleotide
  Description of Combined DNA/RNA Molecule: Synthetic oligonucleotide
uauctuaugacaguucuggacuc

SEQ ID NO: 644 - DNA, 23 bp, Artificial Sequence
  Description of Artificial Sequence: Synthetic oligonucleotide
  Description of Combined DNA/RNA Molecule: Synthetic oligonucleotide
uauctuaugacaguucuggacuc

SEQ ID NO: 645 - DNA, 23 bp, Artificial Sequence
  Description of Artificial Sequence: Synthetic oligonucleotide
  Description of Combined DNA/RNA Molecule: Synthetic oligonucleotide
uauctuaugacaguucaggacuc

SEQ ID NO: 646 - DNA, 23 bp, Artificial Sequence
  Description of Artificial Sequence: Synthetic oligonucleotide
  Description of Combined DNA/RNA Molecule: Synthetic oligonucleotide
uauctuaugacaguucucgacuc

SEQ ID NO: 647 - DNA, 23 bp, Artificial Sequence
  Description of Artificial Sequence: Synthetic oligonucleotide
  Description of Combined DNA/RNA Molecule: Synthetic oligonucleotide
uauctuaugacaguucuggacuc

SEQ ID NO: 648 - DNA, 23 bp, Artificial Sequence
  Description of Artificial Sequence: Synthetic oligonucleotide
  Description of Combined DNA/RNA Molecule: Synthetic oligonucleotide
uauctuaugacaguucuggacuc

SEQ ID NO: 649 - DNA, 23 bp, Artificial Sequence
  Description of Artificial Sequence: Synthetic oligonucleotide
  Description of Combined DNA/RNA Molecule: Synthetic oligonucleotide
uauctuaugacaguucuggacuc

SEQ ID NO: 650 - DNA, 23 bp, Artificial Sequence
  Description of Artificial Sequence: Synthetic oligonucleotide
  Description of Combined DNA/RNA Molecule: Synthetic oligonucleotide
uuaucutaugacaguucuggacu

SEQ ID NO: 651 - DNA, 21 bp, Artificial Sequence
  Description of Artificial Sequence: Synthetic oligonucleotide
  Description of Combined DNA/RNA Molecule: Synthetic oligonucleotide
uauctuaugacaguucugggc

SEQ ID NO: 652 - DNA, 23 bp, Artificial Sequence
  Description of Artificial Sequence: Synthetic oligonucleotide
  Description of Combined DNA/RNA Molecule: Synthetic oligonucleotide
uauatctuaugacaguucuggac

SEQ ID NO: 653 - DNA, 23 bp, Artificial Sequence
  Description of Artificial Sequence: Synthetic oligonucleotide
  Description of Combined DNA/RNA Molecule: Synthetic oligonucleotide
ucauaucuuaugacaguucugga

SEQ ID NO: 654 - DNA, 23 bp, Artificial Sequence
  Description of Artificial Sequence: Synthetic oligonucleotide
  Description of Combined DNA/RNA Molecule: Synthetic oligonucleotide
ucatatcuuaugacaguucugga

SEQ ID NO: 655 - DNA, 23 bp, Artificial Sequence
  Description of Artificial Sequence: Synthetic oligonucleotide
  Description of Combined DNA/RNA Molecule: Synthetic oligonucleotide
ucauaucuuaugacaguucugga

SEQ ID NO: 656 - DNA, 23 bp, Artificial Sequence
  Description of Artificial Sequence: Synthetic oligonucleotide
  Description of Combined DNA/RNA Molecule: Synthetic oligonucleotide
uucatatcuuaugacaguucugg

SEQ ID NO: 657 - DNA, 23 bp, Artificial Sequence
  Description of Artificial Sequence: Synthetic oligonucleotide
  Description of Combined DNA/RNA Molecule: Synthetic oligonucleotide
utcatatcuuatgacaguucugg

SEQ ID NO: 658 - DNA, 23 bp, Artificial Sequence
  Description of Artificial Sequence: Synthetic oligonucleotide
  Description of Combined DNA/RNA Molecule: Synthetic oligonucleotide
ucucauaucuuaugacaguucug

SEQ ID NO: 659 - DNA, 23 bp, Artificial Sequence
  Description of Artificial Sequence: Synthetic oligonucleotide
  Description of Combined DNA/RNA Molecule: Synthetic oligonucleotide
ugcucataucuuaugacaguucu

SEQ ID NO: 660 - DNA, 23 bp, Artificial Sequence
  Description of Artificial Sequence: Synthetic oligonucleotide
  Description of Combined DNA/RNA Molecule: Synthetic oligonucleotide
uagctcauaucuuaugacaguuc

SEQ ID NO: 661 - DNA, 23 bp, Artificial Sequence
  Description of Artificial Sequence: Synthetic oligonucleotide
  Description of Combined DNA/RNA Molecule: Synthetic oligonucleotide
ucagcucauaucuuaugacaguu

SEQ ID NO: 662 - DNA, 23 bp, Artificial Sequence
  Description of Artificial Sequence: Synthetic oligonucleotide
  Description of Combined DNA/RNA Molecule: Synthetic oligonucleotide
ucagctcauaucuuaugacaguu

SEQ ID NO: 663 - DNA, 23 bp, Artificial Sequence
  Description of Artificial Sequence: Synthetic oligonucleotide
  Description of Combined DNA/RNA Molecule: Synthetic oligonucleotide
ucagctcauaucuuaugacaguu

SEQ ID NO: 664 - DNA, 23 bp, Artificial Sequence
  Description of Artificial Sequence: Synthetic oligonucleotide
  Description of Combined DNA/RNA Molecule: Synthetic oligonucleotide
uucagctcauaucuuaugacagu

SEQ ID NO: 665 - DNA, 23 bp, Artificial Sequence
  Description of Artificial Sequence: Synthetic oligonucleotide
  Description of Combined DNA/RNA Molecule: Synthetic oligonucleotide
uuautcagcucauaucuuaugac

SEQ ID NO: 666 - DNA, 23 bp, Artificial Sequence
  Description of Artificial Sequence: Synthetic oligonucleotide
  Description of Combined DNA/RNA Molecule: Synthetic oligonucleotide
uuucactgucucgguauucagcu

SEQ ID NO: 667 - DNA, 23 bp, Artificial Sequence
  Description of Artificial Sequence: Synthetic oligonucleotide
  Description of Combined DNA/RNA Molecule: Synthetic oligonucleotide
ucagcctucacugucucgguauu

SEQ ID NO: 668 - DNA, 23 bp, Artificial Sequence
  Description of Artificial Sequence: Synthetic oligonucleotide
  Description of Combined DNA/RNA Molecule: Synthetic oligonucleotide
ucagcctucactgucucgguauu

SEQ ID NO: 669 - DNA, 23 bp, Artificial Sequence
  Description of Artificial Sequence: Synthetic oligonucleotide
  Description of Combined DNA/RNA Molecule: Synthetic oligonucleotide
uucctucucagccuucacugucu

SEQ ID NO: 670 - DNA, 23 bp, Artificial Sequence
  Description of Artificial Sequence: Synthetic oligonucleotide
  Description of Combined DNA/RNA Molecule: Synthetic oligonucleotide
uuccutcucagccuucacugucu

SEQ ID NO: 671 - DNA, 23 bp, Artificial Sequence
  Description of Artificial Sequence: Synthetic oligonucleotide
  Description of Combined DNA/RNA Molecule: Synthetic oligonucleotide
uuccutctcagccuucacugucu

SEQ ID NO: 672 - DNA, 23 bp, Artificial Sequence
  Description of Artificial Sequence: Synthetic oligonucleotide
  Description of Combined DNA/RNA Molecule: Synthetic oligonucleotide
ucuccagggauuuccuucucagc

SEQ ID NO: 673 - DNA, 23 bp, Artificial Sequence
  Description of Artificial Sequence: Synthetic oligonucleotide
  Description of Combined DNA/RNA Molecule: Synthetic oligonucleotide
uaggacaauggcaccuuuggccu

SEQ ID NO: 674 - DNA, 23 bp, Artificial Sequence
  Description of Artificial Sequence: Synthetic oligonucleotide
  Description of Combined DNA/RNA Molecule: Synthetic oligonucleotide
uauucucuggguucaguuuggag

SEQ ID NO: 675 - DNA, 23 bp, Artificial Sequence
  Description of Artificial Sequence: Synthetic oligonucleotide
  Description of Combined DNA/RNA Molecule: Synthetic oligonucleotide
uautctcuggguucaguuuggag

SEQ ID NO: 676 - DNA, 23 bp, Artificial Sequence
  Description of Artificial Sequence: Synthetic oligonucleotide
  Description of Combined DNA/RNA Molecule: Synthetic oligonucleotide
uauuctctggguucaguuuggag

SEQ ID NO: 677 - DNA, 23 bp, Artificial Sequence
  Description of Artificial Sequence: Synthetic oligonucleotide
  Description of Combined DNA/RNA Molecule: Synthetic oligonucleotide
ugautctcuggguucaguuugga

SEQ ID NO: 678 - DNA, 23 bp, Artificial Sequence
  Description of Artificial Sequence: Synthetic oligonucleotide
  Description of Combined DNA/RNA Molecule: Synthetic oligonucleotide
uggcgacugacugcuuacggaug

SEQ ID NO: 679 - DNA, 23 bp, Artificial Sequence
  Description of Artificial Sequence: Synthetic oligonucleotide
  Description of Combined DNA/RNA Molecule: Synthetic oligonucleotide
uggcgacugacugcuuacggaug

SEQ ID NO: 680 - DNA, 23 bp, Artificial Sequence
  Description of Artificial Sequence: Synthetic oligonucleotide
  Description of Combined DNA/RNA Molecule: Synthetic oligonucleotide
uggcgactgacugcuuacggaug

SEQ ID NO: 681 - DNA, 23 bp, Artificial Sequence
  Description of Artificial Sequence: Synthetic oligonucleotide
  Description of Combined DNA/RNA Molecule: Synthetic oligonucleotide
uggcgacugactgcuuacggaug

SEQ ID NO: 682 - DNA, 23 bp, Artificial Sequence
  Description of Artificial Sequence: Synthetic oligonucleotide
  Description of Combined DNA/RNA Molecule: Synthetic oligonucleotide
ucautggcgacugacugcuuacg

SEQ ID NO: 683 - DNA, 23 bp, Artificial Sequence
  Description of Artificial Sequence: Synthetic oligonucleotide
  Description of Combined DNA/RNA Molecule: Synthetic oligonucleotide
uaaggcauuggcgacugacugcu

SEQ ID NO: 684 - DNA, 23 bp, Artificial Sequence
  Description of Artificial Sequence: Synthetic oligonucleotide
  Description of Combined DNA/RNA Molecule: Synthetic oligonucleotide
uaugaaggcauuggcgacugacu

SEQ ID NO: 685 - DNA, 23 bp, Artificial Sequence
  Description of Artificial Sequence: Synthetic oligonucleotide
  Description of Combined DNA/RNA Molecule: Synthetic oligonucleotide
uugatgaaggcauuggcgacuga

SEQ ID NO: 686 - DNA, 23 bp, Artificial Sequence
  Description of Artificial Sequence: Synthetic oligonucleotide
  Description of Combined DNA/RNA Molecule: Synthetic oligonucleotide
ucagaugaugaaggcauuggcga

SEQ ID NO: 687 - DNA, 23 bp, Artificial Sequence
  Description of Artificial Sequence: Synthetic oligonucleotide
  Description of Combined DNA/RNA Molecule: Synthetic oligonucleotide
uggugccacagaugaugaaggca

SEQ ID NO: 688 - DNA, 23 bp, Artificial Sequence
  Description of Artificial Sequence: Synthetic oligonucleotide
  Description of Combined DNA/RNA Molecule: Synthetic oligonucleotide
uggugccacagaugaugaaggca

SEQ ID NO: 689 - DNA, 23 bp, Artificial Sequence
  Description of Artificial Sequence: Synthetic oligonucleotide
  Description of Combined DNA/RNA Molecule: Synthetic oligonucleotide
ucggtgtacaaggugccacagau

SEQ ID NO: 690 - DNA, 23 bp, Artificial Sequence
  Description of Artificial Sequence: Synthetic oligonucleotide
  Description of Combined DNA/RNA Molecule: Synthetic oligonucleotide
uauaagcaaaguugacgguagca

SEQ ID NO: 691 - DNA, 23 bp, Artificial Sequence
  Description of Artificial Sequence: Synthetic oligonucleotide
  Description of Combined DNA/RNA Molecule: Synthetic oligonucleotide
uauaagcaaaguugacgguagca

SEQ ID NO: 692 - RNA, 23 nt, Artificial Sequence
  Description of Artificial Sequence: Synthetic oligonucleotide
ucauaagcaaaguugacgguagc

SEQ ID NO: 693 - RNA, 23 nt, Artificial Sequence
  Description of Artificial Sequence: Synthetic oligonucleotide
ucauaagcaaaguugacgguagc

SEQ ID NO: 694 - DNA, 23 bp, Artificial Sequence
  Description of Artificial Sequence: Synthetic oligonucleotide
  Description of Combined DNA/RNA Molecule: Synthetic oligonucleotide
ucauaagcaaaguugacgguagc

SEQ ID NO: 695 - DNA, 23 bp, Artificial Sequence
  Description of Artificial Sequence: Synthetic oligonucleotide
  Description of Combined DNA/RNA Molecule: Synthetic oligonucleotide
ucataagcaaaguugacgguagc

SEQ ID NO: 696 - DNA, 23 bp, Artificial Sequence
  Description of Artificial Sequence: Synthetic oligonucleotide
  Description of Combined DNA/RNA Molecule: Synthetic oligonucleotide
ucauaagcaaaguugacgguagc

SEQ ID NO: 697 - DNA, 23 bp, Artificial Sequence
  Description of Artificial Sequence: Synthetic oligonucleotide
  Description of Combined DNA/RNA Molecule: Synthetic oligonucleotide
ucauaagcaaaguugaggguagc

SEQ ID NO: 698 - DNA, 23 bp, Artificial Sequence
  Description of Artificial Sequence: Synthetic oligonucleotide
  Description of Combined DNA/RNA Molecule: Synthetic oligonucleotide
ucauaagcaaaguugaccguagc

SEQ ID NO: 699 - DNA, 23 bp, Artificial Sequence
  Description of Artificial Sequence: Synthetic oligonucleotide
  Description of Combined DNA/RNA Molecule: Synthetic oligonucleotide
ucauaagcaaaguugacgcuagc

SEQ ID NO: 700 - DNA, 23 bp, Artificial Sequence
  Description of Artificial Sequence: Synthetic oligonucleotide
  Description of Combined DNA/RNA Molecule: Synthetic oligonucleotide
ucauaagcaaaguugacgguagc

SEQ ID NO: 701 - DNA, 23 bp, Artificial Sequence
  Description of Artificial Sequence: Synthetic oligonucleotide
  Description of Combined DNA/RNA Molecule: Synthetic oligonucleotide
ucauaagcaaaguugacgguagc

SEQ ID NO: 702 - DNA, 23 bp, Artificial Sequence
  Description of Artificial Sequence: Synthetic oligonucleotide
  Description of Combined DNA/RNA Molecule: Synthetic oligonucleotide
uucataagcaaaguugacgguag

SEQ ID NO: 703 - DNA, 23 bp, Artificial Sequence
  Description of Artificial Sequence: Synthetic oligonucleotide
  Description of Combined DNA/RNA Molecule: Synthetic oligonucleotide
utcataagcaaaguugacgguag

SEQ ID NO: 704 - DNA, 21 bp, Artificial Sequence
  Description of Artificial Sequence: Synthetic oligonucleotide
  Description of Combined DNA/RNA Molecule: Synthetic oligonucleotide
ucauaagcaaaguugacggug

SEQ ID NO: 705 - DNA, 23 bp, Artificial Sequence
  Description of Artificial Sequence: Synthetic oligonucleotide
  Description of Combined DNA/RNA Molecule: Synthetic oligonucleotide
ugucauaagcaaaguugacggua

SEQ ID NO: 706 - DNA, 23 bp, Artificial Sequence
  Description of Artificial Sequence: Synthetic oligonucleotide
  Description of Combined DNA/RNA Molecule: Synthetic oligonucleotide
uugucataagcaaaguugacggu

SEQ ID NO: 707 - DNA, 23 bp, Artificial Sequence
  Description of Artificial Sequence: Synthetic oligonucleotide
  Description of Combined DNA/RNA Molecule: Synthetic oligonucleotide
ugugtcauaagcaaaguugacgg

SEQ ID NO: 708 - DNA, 23 bp, Artificial Sequence
  Description of Artificial Sequence: Synthetic oligonucleotide
  Description of Combined DNA/RNA Molecule: Synthetic oligonucleotide
uugugucauaagcaaaguugacg

SEQ ID NO: 709 - DNA, 23 bp, Artificial Sequence
  Description of Artificial Sequence: Synthetic oligonucleotide
  Description of Combined DNA/RNA Molecule: Synthetic oligonucleotide
uugtgtcauaagcaaaguugacg

SEQ ID NO: 710 - DNA, 23 bp, Artificial Sequence
  Description of Artificial Sequence: Synthetic oligonucleotide
  Description of Combined DNA/RNA Molecule: Synthetic oligonucleotide
ucugtgtcauaagcaaaguugac

SEQ ID NO: 711 - DNA, 23 bp, Artificial Sequence
  Description of Artificial Sequence: Synthetic oligonucleotide
  Description of Combined DNA/RNA Molecule: Synthetic oligonucleotide
uccugugucauaagcaaaguuga

SEQ ID NO: 712 - DNA, 23 bp, Artificial Sequence
  Description of Artificial Sequence: Synthetic oligonucleotide
  Description of Combined DNA/RNA Molecule: Synthetic oligonucleotide
ugcctgtgucauaagcaaaguug

SEQ ID NO: 713 - DNA, 23 bp, Artificial Sequence
  Description of Artificial Sequence: Synthetic oligonucleotide
  Description of Combined DNA/RNA Molecule: Synthetic oligonucleotide
uugccugugucauaagcaaaguu

SEQ ID NO: 714 - DNA, 23 bp, Artificial Sequence
  Description of Artificial Sequence: Synthetic oligonucleotide
  Description of Combined DNA/RNA Molecule: Synthetic oligonucleotide
uuugcugauaccugugccugugu

SEQ ID NO: 715 - DNA, 23 bp, Artificial Sequence
  Description of Artificial Sequence: Synthetic oligonucleotide
  Description of Combined DNA/RNA Molecule: Synthetic oligonucleotide
uaaucatgcugcuguacuuauag

SEQ ID NO: 716 - DNA, 23 bp, Artificial Sequence
  Description of Artificial Sequence: Synthetic oligonucleotide
  Description of Combined DNA/RNA Molecule: Synthetic oligonucleotide
ucaatcaugcugcuguacuuaua

SEQ ID NO: 717 - DNA, 23 bp, Artificial Sequence
  Description of Artificial Sequence: Synthetic oligonucleotide
  Description of Combined DNA/RNA Molecule: Synthetic oligonucleotide
uucaaucaugcugcuguacuuau

SEQ ID NO: 718 - DNA, 23 bp, Artificial Sequence
  Description of Artificial Sequence: Synthetic oligonucleotide
  Description of Combined DNA/RNA Molecule: Synthetic oligonucleotide
uucaatcaugcugcuguacuuau

SEQ ID NO: 719 - DNA, 23 bp, Artificial Sequence
  Description of Artificial Sequence: Synthetic oligonucleotide
  Description of Combined DNA/RNA Molecule: Synthetic oligonucleotide
uucaatcaugcugcuguacuuau

SEQ ID NO: 720 - DNA, 23 bp, Artificial Sequence
  Description of Artificial Sequence: Synthetic oligonucleotide
  Description of Combined DNA/RNA Molecule: Synthetic oligonucleotide
ugucaatcaugcugcuguacuua

SEQ ID NO: 721 - DNA, 23 bp, Artificial Sequence
  Description of Artificial Sequence: Synthetic oligonucleotide
  Description of Combined DNA/RNA Molecule: Synthetic oligonucleotide
ugucaatcaugcugcuguacuua

SEQ ID NO: 722 - DNA, 23 bp, Artificial Sequence
  Description of Artificial Sequence: Synthetic oligonucleotide
  Description of Combined DNA/RNA Molecule: Synthetic oligonucleotide
uagucaaucaugcugcuguacuu

SEQ ID NO: 723 - RNA, 23 nt, Artificial Sequence
  Description of Artificial Sequence: Synthetic oligonucleotide
uagucaaucaugcugcuguacuu

SEQ ID NO: 724 - DNA, 23 bp, Artificial Sequence
  Description of Artificial Sequence: Synthetic oligonucleotide
  Description of Combined DNA/RNA Molecule: Synthetic oligonucleotide
uagucaaucaugcugcuguacuu

SEQ ID NO: 725 - DNA, 23 bp, Artificial Sequence
  Description of Artificial Sequence: Synthetic oligonucleotide
  Description of Combined DNA/RNA Molecule: Synthetic oligonucleotide
uagucaaucaugcugcuguacuu

SEQ ID NO: 726 - DNA, 23 bp, Artificial Sequence
  Description of Artificial Sequence: Synthetic oligonucleotide
  Description of Combined DNA/RNA Molecule: Synthetic oligonucleotide
uagucaaucaugcugcuguacuu

SEQ ID NO: 727 - DNA, 23 bp, Artificial Sequence
  Description of Artificial Sequence: Synthetic oligonucleotide
  Description of Combined DNA/RNA Molecule: Synthetic oligonucleotide
uagucaaucaugcugcuguacuu

SEQ ID NO: 728 - DNA, 23 bp, Artificial Sequence
  Description of Artificial Sequence: Synthetic oligonucleotide
  Description of Combined DNA/RNA Molecule: Synthetic oligonucleotide
uagucaaucaugcugcaguacuu

SEQ ID NO: 729 - DNA, 23 bp, Artificial Sequence
  Description of Artificial Sequence: Synthetic oligonucleotide
  Description of Combined DNA/RNA Molecule: Synthetic oligonucleotide
uagucaaucaugcugcucuacuu

SEQ ID NO: 730 - DNA, 23 bp, Artificial Sequence
  Description of Artificial Sequence: Synthetic oligonucleotide
  Description of Combined DNA/RNA Molecule: Synthetic oligonucleotide
uagucaaucaugcugcugaacuu

SEQ ID NO: 731 - DNA, 23 bp, Artificial Sequence
  Description of Artificial Sequence: Synthetic oligonucleotide
  Description of Combined DNA/RNA Molecule: Synthetic oligonucleotide
uagucaaucaugcugcuguacuu

SEQ ID NO: 732 - DNA, 23 bp, Artificial Sequence
  Description of Artificial Sequence: Synthetic oligonucleotide
  Description of Combined DNA/RNA Molecule: Synthetic oligonucleotide
uuagtcaaucaugcugcuguacu

SEQ ID NO: 733 - DNA, 21 bp, Artificial Sequence
  Description of Artificial Sequence: Synthetic oligonucleotide
  Description of Combined DNA/RNA Molecule: Synthetic oligonucleotide
uagucaaucaugcugcugugc

SEQ ID NO: 734 - DNA, 23 bp, Artificial Sequence
  Description of Artificial Sequence: Synthetic oligonucleotide
  Description of Combined DNA/RNA Molecule: Synthetic oligonucleotide
uguagucaaucaugcugcuguac

SEQ ID NO: 735 - DNA, 23 bp, Artificial Sequence
  Description of Artificial Sequence: Synthetic oligonucleotide
  Description of Combined DNA/RNA Molecule: Synthetic oligonucleotide
uguagtcaaucaugcugcuguac

SEQ ID NO: 736 - DNA, 23 bp, Artificial Sequence
  Description of Artificial Sequence: Synthetic oligonucleotide
  Description of Combined DNA/RNA Molecule: Synthetic oligonucleotide
uguagtcaaucaugcugcuguac

SEQ ID NO: 737 - DNA, 23 bp, Artificial Sequence
  Description of Artificial Sequence: Synthetic oligonucleotide
  Description of Combined DNA/RNA Molecule: Synthetic oligonucleotide
uuguagtcaaucaugcugcugua

SEQ ID NO: 738 - DNA, 23 bp, Artificial Sequence
  Description of Artificial Sequence: Synthetic oligonucleotide
  Description of Combined DNA/RNA Molecule: Synthetic oligonucleotide
uuugtagucaaucaugcugcugu

SEQ ID NO: 739 - DNA, 23 bp, Artificial Sequence
  Description of Artificial Sequence: Synthetic oligonucleotide
  Description of Combined DNA/RNA Molecule: Synthetic oligonucleotide
uguuguagucaaucaugcugcug

SEQ ID NO: 740 - DNA, 23 bp, Artificial Sequence
  Description of Artificial Sequence: Synthetic oligonucleotide
  Description of Combined DNA/RNA Molecule: Synthetic oligonucleotide
uggutgtagucaaucaugcugcu

SEQ ID NO: 741 - DNA, 23 bp, Artificial Sequence
  Description of Artificial Sequence: Synthetic oligonucleotide
  Description of Combined DNA/RNA Molecule: Synthetic oligonucleotide
uggggutguagucaaucaugcug

SEQ ID NO: 742 - DNA, 23 bp, Artificial Sequence
  Description of Artificial Sequence: Synthetic oligonucleotide
  Description of Combined DNA/RNA Molecule: Synthetic oligonucleotide
uguugucccaggcaaagagcuuc

SEQ ID NO: 743 - DNA, 23 bp, Artificial Sequence
  Description of Artificial Sequence: Synthetic oligonucleotide
  Description of Combined DNA/RNA Molecule: Synthetic oligonucleotide
ugutgtcccaggcaaagagcuuc

SEQ ID NO: 744 - DNA, 23 bp, Artificial Sequence
  Description of Artificial Sequence: Synthetic oligonucleotide
  Description of Combined DNA/RNA Molecule: Synthetic oligonucleotide
uaugtucaaguugucccaggcaa

SEQ ID NO: 745 - DNA, 23 bp, Artificial Sequence
  Description of Artificial Sequence: Synthetic oligonucleotide
  Description of Combined DNA/RNA Molecule: Synthetic oligonucleotide
uaugutcaaguugucccaggcaa

SEQ ID NO: 746 - DNA, 23 bp, Artificial Sequence
  Description of Artificial Sequence: Synthetic oligonucleotide
  Description of Combined DNA/RNA Molecule: Synthetic oligonucleotide
uaugutcaaguugucccaggcaa

SEQ ID NO: 747 - DNA, 23 bp, Artificial Sequence
  Description of Artificial Sequence: Synthetic oligonucleotide
  Description of Combined DNA/RNA Molecule: Synthetic oligonucleotide
uccatgtucaaguugucccaggc

SEQ ID NO: 748 - DNA, 23 bp, Artificial Sequence
  Description of Artificial Sequence: Synthetic oligonucleotide
  Description of Combined DNA/RNA Molecule: Synthetic oligonucleotide
uaccauguucaaguugucccagg

SEQ ID NO: 749 - DNA, 23 bp, Artificial Sequence
  Description of Artificial Sequence: Synthetic oligonucleotide
  Description of Combined DNA/RNA Molecule: Synthetic oligonucleotide
ugaccatguucaaguugucccag

SEQ ID NO: 750 - DNA, 23 bp, Artificial Sequence
  Description of Artificial Sequence: Synthetic oligonucleotide
  Description of Combined DNA/RNA Molecule: Synthetic oligonucleotide
ugaccatguucaaguugucccag

SEQ ID NO: 751 - DNA, 23 bp, Artificial Sequence
  Description of Artificial Sequence: Synthetic oligonucleotide
  Description of Combined DNA/RNA Molecule: Synthetic oligonucleotide
uugaccauguucaaguuguccca

SEQ ID NO: 752 - DNA, 23 bp, Artificial Sequence
  Description of Artificial Sequence: Synthetic oligonucleotide
  Description of Combined DNA/RNA Molecule: Synthetic oligonucleotide
ugugaccauguucaaguuguccc

SEQ ID NO: 753 - DNA, 23 bp, Artificial Sequence
  Description of Artificial Sequence: Synthetic oligonucleotide
  Description of Combined DNA/RNA Molecule: Synthetic oligonucleotide
ugugaccauguucaaguuguccc

SEQ ID NO: 754 - DNA, 23 bp, Artificial Sequence
  Description of Artificial Sequence: Synthetic oligonucleotide
  Description of Combined DNA/RNA Molecule: Synthetic oligonucleotide
uagugaccauguucaaguugucc

SEQ ID NO: 755 - DNA, 23 bp, Artificial Sequence
  Description of Artificial Sequence: Synthetic oligonucleotide
  Description of Combined DNA/RNA Molecule: Synthetic oligonucleotide
uagtgaccauguucaaguugucc

SEQ ID NO: 756 - DNA, 23 bp, Artificial Sequence
  Description of Artificial Sequence: Synthetic oligonucleotide
  Description of Combined DNA/RNA Molecule: Synthetic oligonucleotide
uaagtgaccauguucaaguuguc

SEQ ID NO: 757 - DNA, 23 bp, Artificial Sequence
  Description of Artificial Sequence: Synthetic oligonucleotide
  Description of Combined DNA/RNA Molecule: Synthetic oligonucleotide
uuaagugaccauguucaaguugu

SEQ ID NO: 758 - DNA, 23 bp, Artificial Sequence
  Description of Artificial Sequence: Synthetic oligonucleotide
  Description of Combined DNA/RNA Molecule: Synthetic oligonucleotide
uauaagtgaccauguucaaguug

SEQ ID NO: 759 - DNA, 23 bp, Artificial Sequence
  Description of Artificial Sequence: Synthetic oligonucleotide
  Description of Combined DNA/RNA Molecule: Synthetic oligonucleotide
ucauaagugaccauguucaaguu

SEQ ID NO: 760 - DNA, 23 bp, Artificial Sequence
  Description of Artificial Sequence: Synthetic oligonucleotide
  Description of Combined DNA/RNA Molecule: Synthetic oligonucleotide
ucauaagugaccauguucaaguu

SEQ ID NO: 761 - DNA, 23 bp, Artificial Sequence
  Description of Artificial Sequence: Synthetic oligonucleotide
  Description of Combined DNA/RNA Molecule: Synthetic oligonucleotide
ucataagugaccauguucaaguu

SEQ ID NO: 762 - DNA, 23 bp, Artificial Sequence
  Description of Artificial Sequence: Synthetic oligonucleotide
  Description of Combined DNA/RNA Molecule: Synthetic oligonucleotide
ucauaagugaccauguucaaguu

SEQ ID NO: 763 - DNA, 23 bp, Artificial Sequence
  Description of Artificial Sequence: Synthetic oligonucleotide
  Description of Combined DNA/RNA Molecule: Synthetic oligonucleotide
ucauaagugaccauguacaaguu

SEQ ID NO: 764 - DNA, 23 bp, Artificial Sequence
  Description of Artificial Sequence: Synthetic oligonucleotide
  Description of Combined DNA/RNA Molecule: Synthetic oligonucleotide
ucauaagugaccauguugaaguu

SEQ ID NO: 765 - DNA, 23 bp, Artificial Sequence
  Description of Artificial Sequence: Synthetic oligonucleotide
  Description of Combined DNA/RNA Molecule: Synthetic oligonucleotide
ucauaagugaccauguucuaguu

SEQ ID NO: 766 - RNA, 23 nt, Artificial Sequence
  Description of Artificial Sequence: Synthetic oligonucleotide
ucauaagugaccauguucaaguu

SEQ ID NO: 767 - DNA, 23 bp, Artificial Sequence
  Description of Artificial Sequence: Synthetic oligonucleotide
  Description of Combined DNA/RNA Molecule: Synthetic oligonucleotide
ucauaagugaccauguucaaguu

SEQ ID NO: 768 - DNA, 23 bp, Artificial Sequence
  Description of Artificial Sequence: Synthetic oligonucleotide
  Description of Combined DNA/RNA Molecule: Synthetic oligonucleotide
ucauaagugaccauguucaaguu

SEQ ID NO: 769 - DNA, 23 bp, Artificial Sequence
  Description of Artificial Sequence: Synthetic oligonucleotide
  Description of Combined DNA/RNA Molecule: Synthetic oligonucleotide
uucataagugaccauguucaagu

SEQ ID NO: 770 - DNA, 23 bp, Artificial Sequence
  Description of Artificial Sequence: Synthetic oligonucleotide
  Description of Combined DNA/RNA Molecule: Synthetic oligonucleotide
uucataagugaccauguucaagu

SEQ ID NO: 771 - DNA, 23 bp, Artificial Sequence
  Description of Artificial Sequence: Synthetic oligonucleotide
  Description of Combined DNA/RNA Molecule: Synthetic oligonucleotide
utcataagugaccauguucaagu

SEQ ID NO: 772 - DNA, 23 bp, Artificial Sequence
  Description of Artificial Sequence: Synthetic oligonucleotide
  Description of Combined DNA/RNA Molecule: Synthetic oligonucleotide
utcataagugaccauguucaagu

SEQ ID NO: 773 - DNA, 23 bp, Artificial Sequence
  Description of Artificial Sequence: Synthetic oligonucleotide
  Description of Combined DNA/RNA Molecule: Synthetic oligonucleotide
uucataagugaccaugaucaagu

SEQ ID NO: 774 - DNA, 23 bp, Artificial Sequence
  Description of Artificial Sequence: Synthetic oligonucleotide
  Description of Combined DNA/RNA Molecule: Synthetic oligonucleotide
uucataagugaccauguacaagu

SEQ ID NO: 775 - DNA, 23 bp, Artificial Sequence
  Description of Artificial Sequence: Synthetic oligonucleotide
  Description of Combined DNA/RNA Molecule: Synthetic oligonucleotide
uucataagugaccauguugaagu

SEQ ID NO: 776 - RNA, 23 nt, Artificial Sequence
  Description of Artificial Sequence: Synthetic oligonucleotide
uucauaagugaccauguucaagu

SEQ ID NO: 777 - DNA, 23 bp, Artificial Sequence
  Description of Artificial Sequence: Synthetic oligonucleotide
  Description of Combined DNA/RNA Molecule: Synthetic oligonucleotide
utcataagugaccauguucaagu

SEQ ID NO: 778 - DNA, 21 bp, Artificial Sequence
  Description of Artificial Sequence: Synthetic oligonucleotide
  Description of Combined DNA/RNA Molecule: Synthetic oligonucleotide
ucauaagugaccauguucagg

SEQ ID NO: 779 - DNA, 23 bp, Artificial Sequence
  Description of Artificial Sequence: Synthetic oligonucleotide
  Description of Combined DNA/RNA Molecule: Synthetic oligonucleotide
ugucauaagugaccauguucaag

SEQ ID NO: 780 - DNA, 21 bp, Artificial Sequence
  Description of Artificial Sequence: Synthetic oligonucleotide
  Description of Combined DNA/RNA Molecule: Synthetic oligonucleotide
uucataagugaccauguucgg

SEQ ID NO: 781 - DNA, 23 bp, Artificial Sequence
  Description of Artificial Sequence: Synthetic oligonucleotide
  Description of Combined DNA/RNA Molecule: Synthetic oligonucleotide
uugucataagugaccauguucaa

SEQ ID NO: 782 - DNA, 23 bp, Artificial Sequence
  Description of Artificial Sequence: Synthetic oligonucleotide
  Description of Combined DNA/RNA Molecule: Synthetic oligonucleotide
uaugtcauaagugaccauguuca

SEQ ID NO: 783 - DNA, 23 bp, Artificial Sequence
  Description of Artificial Sequence: Synthetic oligonucleotide
  Description of Combined DNA/RNA Molecule: Synthetic oligonucleotide
ugaugucauaagugaccauguuc

SEQ ID NO: 784 - DNA, 23 bp, Artificial Sequence
  Description of Artificial Sequence: Synthetic oligonucleotide
  Description of Combined DNA/RNA Molecule: Synthetic oligonucleotide
ugatgtcauaagugaccauguuc

SEQ ID NO: 785 - DNA, 23 bp, Artificial Sequence
  Description of Artificial Sequence: Synthetic oligonucleotide
  Description of Combined DNA/RNA Molecule: Synthetic oligonucleotide
ugaugtcauaagugaccauguuc

SEQ ID NO: 786 - DNA, 23 bp, Artificial Sequence
  Description of Artificial Sequence: Synthetic oligonucleotide
  Description of Combined DNA/RNA Molecule: Synthetic oligonucleotide
uugatgtcauaagugaccauguu

SEQ ID NO: 787 - DNA, 23 bp, Artificial Sequence
  Description of Artificial Sequence: Synthetic oligonucleotide
  Description of Combined DNA/RNA Molecule: Synthetic oligonucleotide
uuugaugucauaagugaccaugu

SEQ ID NO: 788 - DNA, 23 bp, Artificial Sequence
  Description of Artificial Sequence: Synthetic oligonucleotide
  Description of Combined DNA/RNA Molecule: Synthetic oligonucleotide
ucuugatgucauaagugaccaug

SEQ ID NO: 789 - DNA, 23 bp, Artificial Sequence
  Description of Artificial Sequence: Synthetic oligonucleotide
  Description of Combined DNA/RNA Molecule: Synthetic oligonucleotide
ugcutgaugucauaagugaccau

SEQ ID NO: 790 - DNA, 23 bp, Artificial Sequence
  Description of Artificial Sequence: Synthetic oligonucleotide
  Description of Combined DNA/RNA Molecule: Synthetic oligonucleotide
uagctugaugucauaagugacca

SEQ ID NO: 791 - DNA, 23 bp, Artificial Sequence
  Description of Artificial Sequence: Synthetic oligonucleotide
  Description of Combined DNA/RNA Molecule: Synthetic oligonucleotide
uccctgagcaucuccuucugcca

SEQ ID NO: 792 - DNA, 23 bp, Artificial Sequence
  Description of Artificial Sequence: Synthetic oligonucleotide
  Description of Combined DNA/RNA Molecule: Synthetic oligonucleotide
uuggcuggcuggcucucccuuca

SEQ ID NO: 793 - DNA, 23 bp, Artificial Sequence
  Description of Artificial Sequence: Synthetic oligonucleotide
  Description of Combined DNA/RNA Molecule: Synthetic oligonucleotide
uagatggugaccauguucauccu

SEQ ID NO: 794 - DNA, 23 bp, Artificial Sequence
  Description of Artificial Sequence: Synthetic oligonucleotide
  Description of Combined DNA/RNA Molecule: Synthetic oligonucleotide
uauuaaacaucccauaaaugcug

SEQ ID NO: 795 - DNA, 23 bp, Artificial Sequence
  Description of Artificial Sequence: Synthetic oligonucleotide
  Description of Combined DNA/RNA Molecule: Synthetic oligonucleotide
uuugaacuaugucauuaaacauc

SEQ ID NO: 796 - DNA, 23 bp, Artificial Sequence
  Description of Artificial Sequence: Synthetic oligonucleotide
  Description of Combined DNA/RNA Molecule: Synthetic oligonucleotide
uuugaacuaugucauuaaacauc

SEQ ID NO: 797 - DNA, 23 bp, Artificial Sequence
  Description of Artificial Sequence: Synthetic oligonucleotide
  Description of Combined DNA/RNA Molecule: Synthetic oligonucleotide
uuugaactaugucauuaaacauc

SEQ ID NO: 798 - DNA, 23 bp, Artificial Sequence
  Description of Artificial Sequence: Synthetic oligonucleotide
  Description of Combined DNA/RNA Molecule: Synthetic oligonucleotide
ucuugaacuaugucauuaaacau

SEQ ID NO: 799 - DNA, 23 bp, Artificial Sequence
  Description of Artificial Sequence: Synthetic oligonucleotide
  Description of Combined DNA/RNA Molecule: Synthetic oligonucleotide
ucuugaacuaugucauuaaacau

SEQ ID NO: 800 - DNA, 23 bp, Artificial Sequence
  Description of Artificial Sequence: Synthetic oligonucleotide
  Description of Combined DNA/RNA Molecule: Synthetic oligonucleotide
uacutgaacuaugucauuaaaca

SEQ ID NO: 801 - DNA, 23 bp, Artificial Sequence
  Description of Artificial Sequence: Synthetic oligonucleotide
  Description of Combined DNA/RNA Molecule: Synthetic oligonucleotide
uaactugaacuaugucauuaaac

SEQ ID NO: 802 - DNA, 23 bp, Artificial Sequence
  Description of Artificial Sequence: Synthetic oligonucleotide
  Description of Combined DNA/RNA Molecule: Synthetic oligonucleotide
uaaacutgaacuaugucauuaaa

SEQ ID NO: 803 - DNA, 23 bp, Artificial Sequence
  Description of Artificial Sequence: Synthetic oligonucleotide
  Description of Combined DNA/RNA Molecule: Synthetic oligonucleotide
uaaacutgaactaugucauuaaa

SEQ ID NO: 804 - DNA, 23 bp, Artificial Sequence
  Description of Artificial Sequence: Synthetic oligonucleotide
  Description of Combined DNA/RNA Molecule: Synthetic oligonucleotide
uaaaactugaacuaugucauuaa

SEQ ID NO: 805 - DNA, 23 bp, Artificial Sequence
  Description of Artificial Sequence: Synthetic oligonucleotide
  Description of Combined DNA/RNA Molecule: Synthetic oligonucleotide
uaaaactugaacuaugucauuaa

SEQ ID NO: 806 - DNA, 23 bp, Artificial Sequence
  Description of Artificial Sequence: Synthetic oligonucleotide
  Description of Combined DNA/RNA Molecule: Synthetic oligonucleotide
ugaaaacuugaacuaugucauua

SEQ ID NO: 807 - DNA, 23 bp, Artificial Sequence
  Description of Artificial Sequence: Synthetic oligonucleotide
  Description of Combined DNA/RNA Molecule: Synthetic oligonucleotide
uagaaaacuugaacuaugucauu

SEQ ID NO: 808 - DNA, 23 bp, Artificial Sequence
  Description of Artificial Sequence: Synthetic oligonucleotide
  Description of Combined DNA/RNA Molecule: Synthetic oligonucleotide
uaagaaaacuugaacuaugucau

SEQ ID NO: 809 - RNA, 23 nt, Artificial Sequence
  Description of Artificial Sequence: Synthetic oligonucleotide
ucaagaaaacuugaacuauguca

SEQ ID NO: 810 - DNA, 23 bp, Artificial Sequence
  Description of Artificial Sequence: Synthetic oligonucleotide
  Description of Combined DNA/RNA Molecule: Synthetic oligonucleotide
ucaagaaaacutgaacuaugucg

SEQ ID NO: 811 - DNA, 23 bp, Artificial Sequence
  Description of Artificial Sequence: Synthetic oligonucleotide
  Description of Combined DNA/RNA Molecule: Synthetic oligonucleotide
ucaagaaaacuugaacuaugucg

SEQ ID NO: 812 - DNA, 23 bp, Artificial Sequence
  Description of Artificial Sequence: Synthetic oligonucleotide
  Description of Combined DNA/RNA Molecule: Synthetic oligonucleotide
ucaagaaaacutgaacuaugucg

SEQ ID NO: 813 - DNA, 23 bp, Artificial Sequence
  Description of Artificial Sequence: Synthetic oligonucleotide
  Description of Combined DNA/RNA Molecule: Synthetic oligonucleotide
ucaagaaaacuugaacaaugucg

SEQ ID NO: 814 - DNA, 23 bp, Artificial Sequence
  Description of Artificial Sequence: Synthetic oligonucleotide
  Description of Combined DNA/RNA Molecule: Synthetic oligonucleotide
ucaagaaaacuugaacuuugucg

SEQ ID NO: 815 - DNA, 23 bp, Artificial Sequence
  Description of Artificial Sequence: Synthetic oligonucleotide
  Description of Combined DNA/RNA Molecule: Synthetic oligonucleotide
ucaagaaaacuugaacuaagucg

SEQ ID NO: 816 - DNA, 23 bp, Artificial Sequence
  Description of Artificial Sequence: Synthetic oligonucleotide
  Description of Combined DNA/RNA Molecule: Synthetic oligonucleotide
ucaagaaaacutgaacuauguca

SEQ ID NO: 817 - DNA, 23 bp, Artificial Sequence
  Description of Artificial Sequence: Synthetic oligonucleotide
  Description of Combined DNA/RNA Molecule: Synthetic oligonucleotide
uacaagaaaactugaacuauguc

SEQ ID NO: 818 - DNA, 21 bp, Artificial Sequence
  Description of Artificial Sequence: Synthetic oligonucleotide
  Description of Combined DNA/RNA Molecule: Synthetic oligonucleotide
ucaagaaaacuugaacuaugu

SEQ ID NO: 819 - DNA, 21 bp, Artificial Sequence
  Description of Artificial Sequence: Synthetic oligonucleotide
  Description of Combined DNA/RNA Molecule: Synthetic oligonucleotide
ucaagaaaacutgaacuaugu

SEQ ID NO: 820 - DNA, 23 bp, Artificial Sequence
  Description of Artificial Sequence: Synthetic oligonucleotide
  Description of Combined DNA/RNA Molecule: Synthetic oligonucleotide
ucacaagaaaacuugaacuaugu

SEQ ID NO: 821 - DNA, 23 bp, Artificial Sequence
  Description of Artificial Sequence: Synthetic oligonucleotide
  Description of Combined DNA/RNA Molecule: Synthetic oligonucleotide
uucacaagaaaacuugaacuaug

SEQ ID NO: 822 - DNA, 23 bp, Artificial Sequence
  Description of Artificial Sequence: Synthetic oligonucleotide
  Description of Combined DNA/RNA Molecule: Synthetic oligonucleotide
utcacaagaaaacuugaacuaug

SEQ ID NO: 823 - DNA, 23 bp, Artificial Sequence
  Description of Artificial Sequence: Synthetic oligonucleotide
  Description of Combined DNA/RNA Molecule: Synthetic oligonucleotide
uaucacaagaaaacuugaacuau

SEQ ID NO: 824 - DNA, 23 bp, Artificial Sequence
  Description of Artificial Sequence: Synthetic oligonucleotide
  Description of Combined DNA/RNA Molecule: Synthetic oligonucleotide
uaucacaagaaaacuugaacuau

SEQ ID NO: 825 - DNA, 23 bp, Artificial Sequence
  Description of Artificial Sequence: Synthetic oligonucleotide
  Description of Combined DNA/RNA Molecule: Synthetic oligonucleotide
uaaucacaagaaaacuugaacua

SEQ ID NO: 826 - DNA, 23 bp, Artificial Sequence
  Description of Artificial Sequence: Synthetic oligonucleotide
  Description of Combined DNA/RNA Molecule: Synthetic oligonucleotide
uaatcacaagaaaacuugaacua

SEQ ID NO: 827 - DNA, 23 bp, Artificial Sequence
  Description of Artificial Sequence: Synthetic oligonucleotide
  Description of Combined DNA/RNA Molecule: Synthetic oligonucleotide
uaaatcacaagaaaacuugaacu

SEQ ID NO: 828 - DNA, 23 bp, Artificial Sequence
  Description of Artificial Sequence: Synthetic oligonucleotide
  Description of Combined DNA/RNA Molecule: Synthetic oligonucleotide
ucaaaucacaagaaaacuugaac

SEQ ID NO: 829 - DNA, 23 bp, Artificial Sequence
  Description of Artificial Sequence: Synthetic oligonucleotide
  Description of Combined DNA/RNA Molecule: Synthetic oligonucleotide
ucaaatcacaagaaaacuugaac

SEQ ID NO: 830 - DNA, 23 bp, Artificial Sequence
  Description of Artificial Sequence: Synthetic oligonucleotide
  Description of Combined DNA/RNA Molecule: Synthetic oligonucleotide
ucaaatcacaagaaaacuugaac

SEQ ID NO: 831 - DNA, 23 bp, Artificial Sequence
  Description of Artificial Sequence: Synthetic oligonucleotide
  Description of Combined DNA/RNA Molecule: Synthetic oligonucleotide
ucaaaucacaagaaaacuugaac

SEQ ID NO: 832 - DNA, 23 bp, Artificial Sequence
  Description of Artificial Sequence: Synthetic oligonucleotide
  Description of Combined DNA/RNA Molecule: Synthetic oligonucleotide
uccaaatcacaagaaaacuugaa

SEQ ID NO: 833 - DNA, 23 bp, Artificial Sequence
  Description of Artificial Sequence: Synthetic oligonucleotide
  Description of Combined DNA/RNA Molecule: Synthetic oligonucleotide
ucccaaaucacaagaaaacuuga

SEQ ID NO: 834 - DNA, 23 bp, Artificial Sequence
  Description of Artificial Sequence: Synthetic oligonucleotide
  Description of Combined DNA/RNA Molecule: Synthetic oligonucleotide
uugcaagagcaaugguuuucagg

SEQ ID NO: 835 - DNA, 23 bp, Artificial Sequence
  Description of Artificial Sequence: Synthetic oligonucleotide
  Description of Combined DNA/RNA Molecule: Synthetic oligonucleotide
uaugcaagagcaaugguuuucag

SEQ ID NO: 836 - DNA, 23 bp, Artificial Sequence
  Description of Artificial Sequence: Synthetic oligonucleotide
  Description of Combined DNA/RNA Molecule: Synthetic oligonucleotide
uaugcaagagcaaugguuuucag

SEQ ID NO: 837 - DNA, 23 bp, Artificial Sequence
  Description of Artificial Sequence: Synthetic oligonucleotide
  Description of Combined DNA/RNA Molecule: Synthetic oligonucleotide
ucaugcaagagcaaugguuuuca

SEQ ID NO: 838 - DNA, 23 bp, Artificial Sequence
  Description of Artificial Sequence: Synthetic oligonucleotide
  Description of Combined DNA/RNA Molecule: Synthetic oligonucleotide
ucaugcaagagcaaugguuuuca

SEQ ID NO: 839 - DNA, 23 bp, Artificial Sequence
  Description of Artificial Sequence: Synthetic oligonucleotide
  Description of Combined DNA/RNA Molecule: Synthetic oligonucleotide
uacatgcaagagcaaugguuuuc

SEQ ID NO: 840 - DNA, 23 bp, Artificial Sequence
  Description of Artificial Sequence: Synthetic oligonucleotide
  Description of Combined DNA/RNA Molecule: Synthetic oligonucleotide
uacaugcaagagcaaugguuuuc

SEQ ID NO: 841 - DNA, 23 bp, Artificial Sequence
  Description of Artificial Sequence: Synthetic oligonucleotide
  Description of Combined DNA/RNA Molecule: Synthetic oligonucleotide
uaacaugcaagagcaaugguuuu

SEQ ID NO: 842 - DNA, 23 bp, Artificial Sequence
  Description of Artificial Sequence: Synthetic oligonucleotide
  Description of Combined DNA/RNA Molecule: Synthetic oligonucleotide
uuaacatgcaagagcaaugguuu

SEQ ID NO: 843 - DNA, 23 bp, Artificial Sequence
  Description of Artificial Sequence: Synthetic oligonucleotide
  Description of Combined DNA/RNA Molecule: Synthetic oligonucleotide
uguaacaugcaagagcaaugguu

SEQ ID NO: 844 - DNA, 23 bp, Artificial Sequence
  Description of Artificial Sequence: Synthetic oligonucleotide
  Description of Combined DNA/RNA Molecule: Synthetic oligonucleotide
uuguaacaugcaagagcaauggu

SEQ ID NO: 845 - DNA, 23 bp, Artificial Sequence
  Description of Artificial Sequence: Synthetic oligonucleotide
  Description of Combined DNA/RNA Molecule: Synthetic oligonucleotide
uugtaacaugcaagagcaauggu

SEQ ID NO: 846 - DNA, 23 bp, Artificial Sequence
  Description of Artificial Sequence: Synthetic oligonucleotide
  Description of Combined DNA/RNA Molecule: Synthetic oligonucleotide
uaugtaacaugcaagagcaaugg

SEQ ID NO: 847 - DNA, 23 bp, Artificial Sequence
  Description of Artificial Sequence: Synthetic oligonucleotide
  Description of Combined DNA/RNA Molecule: Synthetic oligonucleotide
ucauguaacaugcaagagcaaug

SEQ ID NO: 848 - RNA, 23 nt, Artificial Sequence
  Description of Artificial Sequence: Synthetic oligonucleotide
ucauguaacaugcaagagcaaug

SEQ ID NO: 849 - DNA, 23 bp, Artificial Sequence
  Description of Artificial Sequence: Synthetic oligonucleotide
  Description of Combined DNA/RNA Molecule: Synthetic oligonucleotide
ucauguaacaugcaagugcaaug

SEQ ID NO: 850 - DNA, 23 bp, Artificial Sequence
  Description of Artificial Sequence: Synthetic oligonucleotide
  Description of Combined DNA/RNA Molecule: Synthetic oligonucleotide
ucauguaacaugcaagaccaaug

SEQ ID NO: 851 - DNA, 23 bp, Artificial Sequence
  Description of Artificial Sequence: Synthetic oligonucleotide
  Description of Combined DNA/RNA Molecule: Synthetic oligonucleotide
ucauguaacaugcaagaggaaug

SEQ ID NO: 852 - DNA, 23 bp, Artificial Sequence
  Description of Artificial Sequence: Synthetic oligonucleotide
  Description of Combined DNA/RNA Molecule: Synthetic oligonucleotide
ucauguaacaugcaagagcaaug

SEQ ID NO: 853 - DNA, 23 bp, Artificial Sequence
  Description of Artificial Sequence: Synthetic oligonucleotide
  Description of Combined DNA/RNA Molecule: Synthetic oligonucleotide
ucauguaacaugcaagagcaaug

SEQ ID NO: 854 - DNA, 23 bp, Artificial Sequence
  Description of Artificial Sequence: Synthetic oligonucleotide
  Description of Combined DNA/RNA Molecule: Synthetic oligonucleotide
ucauguaacaugcaagagcaaug

SEQ ID NO: 855 - DNA, 23 bp, Artificial Sequence
  Description of Artificial Sequence: Synthetic oligonucleotide
  Description of Combined DNA/RNA Molecule: Synthetic oligonucleotide
uccatgtaacaugcaagagcaau

SEQ ID NO: 856 - DNA, 21 bp, Artificial Sequence
  Description of Artificial Sequence: Synthetic oligonucleotide
  Description of Combined DNA/RNA Molecule: Synthetic oligonucleotide
ucauguaacaugcaagagcgg

SEQ ID NO: 857 - DNA, 23 bp, Artificial Sequence
  Description of Artificial Sequence: Synthetic oligonucleotide
  Description of Combined DNA/RNA Molecule: Synthetic oligonucleotide
uaccauguaacaugcaagagcaa

SEQ ID NO: 858 - DNA, 23 bp, Artificial Sequence
  Description of Artificial Sequence: Synthetic oligonucleotide
  Description of Combined DNA/RNA Molecule: Synthetic oligonucleotide
uaaccatguaacaugcaagagca

SEQ ID NO: 859 - DNA, 23 bp, Artificial Sequence
  Description of Artificial Sequence: Synthetic oligonucleotide
  Description of Combined DNA/RNA Molecule: Synthetic oligonucleotide
uaaccatguaacaugcaagagca

SEQ ID NO: 860 - DNA, 23 bp, Artificial Sequence
  Description of Artificial Sequence: Synthetic oligonucleotide
  Description of Combined DNA/RNA Molecule: Synthetic oligonucleotide
uuaaccauguaacaugcaagagc

SEQ ID NO: 861 - DNA, 23 bp, Artificial Sequence
  Description of Artificial Sequence: Synthetic oligonucleotide
  Description of Combined DNA/RNA Molecule: Synthetic oligonucleotide
uguaaccauguaacaugcaagag

SEQ ID NO: 862 - DNA, 23 bp, Artificial Sequence
  Description of Artificial Sequence: Synthetic oligonucleotide
  Description of Combined DNA/RNA Molecule: Synthetic oligonucleotide
uguaaccauguaacaugcaagag

SEQ ID NO: 863 - DNA, 23 bp, Artificial Sequence
  Description of Artificial Sequence: Synthetic oligonucleotide
  Description of Combined DNA/RNA Molecule: Synthetic oligonucleotide
ugguaaccauguaacaugcaaga

SEQ ID NO: 864 - DNA, 23 bp, Artificial Sequence
  Description of Artificial Sequence: Synthetic oligonucleotide
  Description of Combined DNA/RNA Molecule: Synthetic oligonucleotide
uggtaaccauguaacaugcaaga

SEQ ID NO: 865 - DNA, 23 bp, Artificial Sequence
  Description of Artificial Sequence: Synthetic oligonucleotide
  Description of Combined DNA/RNA Molecule: Synthetic oligonucleotide
ugguaaccaugtaacaugcaaga

SEQ ID NO: 866 - DNA, 23 bp, Artificial Sequence
  Description of Artificial Sequence: Synthetic oligonucleotide
  Description of Combined DNA/RNA Molecule: Synthetic oligonucleotide
uuggtaaccauguaacaugcaag

SEQ ID NO: 867 - DNA, 23 bp, Artificial Sequence
  Description of Artificial Sequence: Synthetic oligonucleotide
  Description of Combined DNA/RNA Molecule: Synthetic oligonucleotide
ugugguaaccauguaacaugcaa

SEQ ID NO: 868 - DNA, 23 bp, Artificial Sequence
  Description of Artificial Sequence: Synthetic oligonucleotide
  Description of Combined DNA/RNA Molecule: Synthetic oligonucleotide
ugugguaaccatguaacaugcaa

SEQ ID NO: 869 - DNA, 23 bp, Artificial Sequence
  Description of Artificial Sequence: Synthetic oligonucleotide
  Description of Combined DNA/RNA Molecule: Synthetic oligonucleotide
uuguggtaaccauguaacaugca

SEQ ID NO: 870 - DNA, 23 bp, Artificial Sequence
  Description of Artificial Sequence: Synthetic oligonucleotide
  Description of Combined DNA/RNA Molecule: Synthetic oligonucleotide
uuugtgguaaccauguaacaugc

SEQ ID NO: 871 - DNA, 23 bp, Artificial Sequence
  Description of Artificial Sequence: Synthetic oligonucleotide
  Description of Combined DNA/RNA Molecule: Synthetic oligonucleotide
ucuugugguaaccauguaacaug

SEQ ID NO: 872 - DNA, 23 bp, Artificial Sequence
  Description of Artificial Sequence: Synthetic oligonucleotide
  Description of Combined DNA/RNA Molecule: Synthetic oligonucleotide
utucgatgcuggccagaggagcu

SEQ ID NO: 873 - DNA, 23 bp, Artificial Sequence
  Description of Artificial Sequence: Synthetic oligonucleotide
  Description of Combined DNA/RNA Molecule: Synthetic oligonucleotide
uuaaaugcaucuuacuuauauuc

SEQ ID NO: 874 - DNA, 23 bp, Artificial Sequence
  Description of Artificial Sequence: Synthetic oligonucleotide
  Description of Combined DNA/RNA Molecule: Synthetic oligonucleotide
uguaaatgcaucuuacuuauauu

SEQ ID NO: 875 - DNA, 23 bp, Artificial Sequence
  Description of Artificial Sequence: Synthetic oligonucleotide
  Description of Combined DNA/RNA Molecule: Synthetic oligonucleotide
uaguaaaugcatcuuacuuauau

SEQ ID NO: 876 - DNA, 23 bp, Artificial Sequence
  Description of Artificial Sequence: Synthetic oligonucleotide
  Description of Combined DNA/RNA Molecule: Synthetic oligonucleotide
utagtaaaugcaucuuacuuaua

SEQ ID NO: 877 - RNA, 23 nt, Artificial Sequence
  Description of Artificial Sequence: Synthetic oligonucleotide
uguaguaaaugcaucuuacuuau

SEQ ID NO: 878 - DNA, 23 bp, Artificial Sequence
  Description of Artificial Sequence: Synthetic oligonucleotide
  Description of Combined DNA/RNA Molecule: Synthetic oligonucleotide
uguaguaaaugcaucuuacuugu

SEQ ID NO: 879 - DNA, 23 bp, Artificial Sequence
  Description of Artificial Sequence: Synthetic oligonucleotide
  Description of Combined DNA/RNA Molecule: Synthetic oligonucleotide
uguaguaaaugcaucuuacuugu

SEQ ID NO: 880 - DNA, 23 bp, Artificial Sequence
  Description of Artificial Sequence: Synthetic oligonucleotide
  Description of Combined DNA/RNA Molecule: Synthetic oligonucleotide
uguaguaaaugcaucuuacuugu

SEQ ID NO: 881 - DNA, 23 bp, Artificial Sequence
  Description of Artificial Sequence: Synthetic oligonucleotide
  Description of Combined DNA/RNA Molecule: Synthetic oligonucleotide
uguaguaaaugcaucuuacuugu

SEQ ID NO: 882 - DNA, 23 bp, Artificial Sequence
  Description of Artificial Sequence: Synthetic oligonucleotide
  Description of Combined DNA/RNA Molecule: Synthetic oligonucleotide
uguaguaaaugcaucuuacuugu

SEQ ID NO: 883 - DNA, 23 bp, Artificial Sequence
  Description of Artificial Sequence: Synthetic oligonucleotide
  Description of Combined DNA/RNA Molecule: Synthetic oligonucleotide
uguaguaaaugcaucuuacuugu

SEQ ID NO: 884 - DNA, 23 bp, Artificial Sequence
  Description of Artificial Sequence: Synthetic oligonucleotide
  Description of Combined DNA/RNA Molecule: Synthetic oligonucleotide
uguaguaaaugcaucuaacuugu

SEQ ID NO: 885 - DNA, 23 bp, Artificial Sequence
  Description of Artificial Sequence: Synthetic oligonucleotide
  Description of Combined DNA/RNA Molecule: Synthetic oligonucleotide
uguaguaaaugcaucuuucuugu

SEQ ID NO: 886 - DNA, 23 bp, Artificial Sequence
  Description of Artificial Sequence: Synthetic oligonucleotide
  Description of Combined DNA/RNA Molecule: Synthetic oligonucleotide
uguaguaaaugcaucuuaguugu

SEQ ID NO: 887 - DNA, 23 bp, Artificial Sequence
  Description of Artificial Sequence: Synthetic oligonucleotide
  Description of Combined DNA/RNA Molecule: Synthetic oligonucleotide
uguaguaaaugcaucuuacuuau

SEQ ID NO: 888 - DNA, 23 bp, Artificial Sequence
  Description of Artificial Sequence: Synthetic oligonucleotide
  Description of Combined DNA/RNA Molecule: Synthetic oligonucleotide
uguaguaaaugcaucuuacuuau

SEQ ID NO: 889 - DNA, 23 bp, Artificial Sequence
  Description of Artificial Sequence: Synthetic oligonucleotide
  Description of Combined DNA/RNA Molecule: Synthetic oligonucleotide
uuguagtaaaugcaucuuacuua

SEQ ID NO: 890 - DNA, 21 bp, Artificial Sequence
  Description of Artificial Sequence: Synthetic oligonucleotide
  Description of Combined DNA/RNA Molecule: Synthetic oligonucleotide
uguaguaaaugcaucuuacuu

SEQ ID NO: 891 - DNA, 23 bp, Artificial Sequence
  Description of Artificial Sequence: Synthetic oligonucleotide
  Description of Combined DNA/RNA Molecule: Synthetic oligonucleotide
uucugaagcauuagaagccaacu

SEQ ID NO: 892 - DNA, 23 bp, Artificial Sequence
  Description of Artificial Sequence: Synthetic oligonucleotide
  Description of Combined DNA/RNA Molecule: Synthetic oligonucleotide
uucuaucugaagcauuagaagcc

SEQ ID NO: 893 - DNA, 23 bp, Artificial Sequence
  Description of Artificial Sequence: Synthetic oligonucleotide
  Description of Combined DNA/RNA Molecule: Synthetic oligonucleotide
uuctatcugaagcauuagaagcc

SEQ ID NO: 894 - DNA, 23 bp, Artificial Sequence
  Description of Artificial Sequence: Synthetic oligonucleotide
  Description of Combined DNA/RNA Molecule: Synthetic oligonucleotide
uucuatctgaagcauuagaagcc

SEQ ID NO: 895 - RNA, 23 nt, Artificial Sequence
  Description of Artificial Sequence: Synthetic oligonucleotide
accucucagcacagcagagcuuu

SEQ ID NO: 896 - RNA, 23 nt, Artificial Sequence
  Description of Artificial Sequence: Synthetic oligonucleotide
accucucagcacagcagagcuuu

SEQ ID NO: 897 - RNA, 23 nt, Artificial Sequence
  Description of Artificial Sequence: Synthetic oligonucleotide
accucucagcacagcagagcuuu

SEQ ID NO: 898 - RNA, 23 nt, Artificial Sequence
  Description of Artificial Sequence: Synthetic oligonucleotide
ccucucagcacagcagagcuuuc

SEQ ID NO: 899 - RNA, 23 nt, Artificial Sequence
  Description of Artificial Sequence: Synthetic oligonucleotide
cacagcagagcuuuccagaggaa

SEQ ID NO: 900 - RNA, 23 nt, Artificial Sequence
  Description of Artificial Sequence: Synthetic oligonucleotide
gcaaugagguucuucugugcacg

SEQ ID NO: 901 - RNA, 23 nt, Artificial Sequence
  Description of Artificial Sequence: Synthetic oligonucleotide
gcaaugagguucuucugugcacg

SEQ ID NO: 902 - RNA, 23 nt, Artificial Sequence
  Description of Artificial Sequence: Synthetic oligonucleotide
caaugagguucuucugugcacgu

SEQ ID NO: 903 - RNA, 23 nt, Artificial Sequence
  Description of Artificial Sequence: Synthetic oligonucleotide
aaugagguucuucugugcacguu

SEQ ID NO: 904 - RNA, 23 nt, Artificial Sequence
  Description of Artificial Sequence: Synthetic oligonucleotide
aaugagguucuucugugcacguu

SEQ ID NO: 905 - RNA, 23 nt, Artificial Sequence
  Description of Artificial Sequence: Synthetic oligonucleotide
augagguucuucugugcacguug

SEQ ID NO: 906 - RNA, 23 nt, Artificial Sequence
  Description of Artificial Sequence: Synthetic oligonucleotide
ugagguucuucugugcacguugc

SEQ ID NO: 907 - RNA, 23 nt, Artificial Sequence
  Description of Artificial Sequence: Synthetic oligonucleotide
ugagguucuucugugcacguugc

SEQ ID NO: 908 - RNA, 23 nt, Artificial Sequence
  Description of Artificial Sequence: Synthetic oligonucleotide
ugagguucuucugugcacguugc

SEQ ID NO: 909 - RNA, 23 nt, Artificial Sequence
  Description of Artificial Sequence: Synthetic oligonucleotide
ugagguucuucugugcacguugc

SEQ ID NO: 910 - RNA, 23 nt, Artificial Sequence
  Description of Artificial Sequence: Synthetic oligonucleotide
ugagguucuucugugcacguugc

SEQ ID NO: 911 - RNA, 23 nt, Artificial Sequence
  Description of Artificial Sequence: Synthetic oligonucleotide
ugagguucuucugugcacguugc

SEQ ID NO: 912 - RNA, 23 nt, Artificial Sequence
  Description of Artificial Sequence: Synthetic oligonucleotide
ugagguucuucugugcacguugc

SEQ ID NO: 913 - RNA, 23 nt, Artificial Sequence
  Description of Artificial Sequence: Synthetic oligonucleotide
ugagguucuucugugcacguugc

SEQ ID NO: 914 - RNA, 23 nt, Artificial Sequence
  Description of Artificial Sequence: Synthetic oligonucleotide
gagguucuucugugcacguugcu

SEQ ID NO: 915 - RNA, 23 nt, Artificial Sequence
  Description of Artificial Sequence: Synthetic oligonucleotide
gagguucuucugugcacguugcu

SEQ ID NO: 916 - RNA, 21 nt, Artificial Sequence
  Description of Artificial Sequence: Synthetic oligonucleotide
agguucuucugugcacguugc

SEQ ID NO: 917 - RNA, 23 nt, Artificial Sequence
  Description of Artificial Sequence: Synthetic oligonucleotide
agguucuucugugcacguugcug

SEQ ID NO: 918 - RNA, 23 nt, Artificial Sequence
  Description of Artificial Sequence: Synthetic oligonucleotide
gguucuucugugcacguugcugc

SEQ ID NO: 919 - RNA, 23 nt, Artificial Sequence
  Description of Artificial Sequence: Synthetic oligonucleotide
guucuucugugcacguugcugca

SEQ ID NO: 920 - RNA, 23 nt, Artificial Sequence
  Description of Artificial Sequence: Synthetic oligonucleotide
guucuucugugcacguugcugca

SEQ ID NO: 921 - RNA, 23 nt, Artificial Sequence
  Description of Artificial Sequence: Synthetic oligonucleotide
uucuucugugcacguugcugcag

SEQ ID NO: 922 - RNA, 23 nt, Artificial Sequence
  Description of Artificial Sequence: Synthetic oligonucleotide
uucuucugugcacguugcugcag

SEQ ID NO: 923 - RNA, 23 nt, Artificial Sequence
  Description of Artificial Sequence: Synthetic oligonucleotide
ucuucugugcacguugcugcagc

SEQ ID NO: 924 - RNA, 23 nt, Artificial Sequence
  Description of Artificial Sequence: Synthetic oligonucleotide
cuucugugcacguugcugcagcu

SEQ ID NO: 925 - RNA, 23 nt, Artificial Sequence
  Description of Artificial Sequence: Synthetic oligonucleotide
uucugugcacguugcugcagcuu

SEQ ID NO: 926 - RNA, 23 nt, Artificial Sequence
  Description of Artificial Sequence: Synthetic oligonucleotide
uucugugcacguugcugcagcuu

SEQ ID NO: 927 - RNA, 23 nt, Artificial Sequence
  Description of Artificial Sequence: Synthetic oligonucleotide
ucugugcacguugcugcagcuuu

SEQ ID NO: 928 - RNA, 23 nt, Artificial Sequence
  Description of Artificial Sequence: Synthetic oligonucleotide
cugugcacguugcugcagcuuug

SEQ ID NO: 929 - RNA, 23 nt, Artificial Sequence
  Description of Artificial Sequence: Synthetic oligonucleotide
gugcacguugcugcagcuuuggg

SEQ ID NO: 930 - RNA, 23 nt, Artificial Sequence
  Description of Artificial Sequence: Synthetic oligonucleotide
ugcacguugcugcagcuuugggc

SEQ ID NO: 931 - RNA, 23 nt, Artificial Sequence
  Description of Artificial Sequence: Synthetic oligonucleotide
cugagaugccagcuguccagcug

SEQ ID NO: 932 - RNA, 23 nt, Artificial Sequence
  Description of Artificial Sequence: Synthetic oligonucleotide
gagaugccagcuguccagcugcu

SEQ ID NO: 933 - RNA, 23 nt, Artificial Sequence
  Description of Artificial Sequence: Synthetic oligonucleotide
agcuguccagcugcugcuucugg

SEQ ID NO: 934 - RNA, 23 nt, Artificial Sequence
  Description of Artificial Sequence: Synthetic oligonucleotide
guccagcugcugcuucuggccug

SEQ ID NO: 935 - RNA, 23 nt, Artificial Sequence
  Description of Artificial Sequence: Synthetic oligonucleotide
uucuggccugccuggugugggau

SEQ ID NO: 936 - RNA, 23 nt, Artificial Sequence
  Description of Artificial Sequence: Synthetic oligonucleotide
uucuggccugccuggugugggau

SEQ ID NO: 937 - RNA, 23 nt, Artificial Sequence
  Description of Artificial Sequence: Synthetic oligonucleotide
uucuggccugccuggugugggau

SEQ ID NO: 938 - RNA, 23 nt, Artificial Sequence
  Description of Artificial Sequence: Synthetic oligonucleotide
ucuggccugccuggugugggaug

SEQ ID NO: 939 - RNA, 23 nt, Artificial Sequence
  Description of Artificial Sequence: Synthetic oligonucleotide
uggccugccuggugugggaugug

SEQ ID NO: 940 - RNA, 23 nt, Artificial Sequence
  Description of Artificial Sequence: Synthetic oligonucleotide
uggccugccuggugugggaugug

SEQ ID NO: 941 - RNA, 23 nt, Artificial Sequence
  Description of Artificial Sequence: Synthetic oligonucleotide
ccagaguggccgaugccaguaua

SEQ ID NO: 942 - RNA, 23 nt, Artificial Sequence
  Description of Artificial Sequence: Synthetic oligonucleotide
ucaguguggccagucccaaugaa

SEQ ID NO: 943 - RNA, 23 nt, Artificial Sequence
  Description of Artificial Sequence: Synthetic oligonucleotide
caguguggccagucccaaugaau

SEQ ID NO: 944 - RNA, 23 nt, Artificial Sequence
  Description of Artificial Sequence: Synthetic oligonucleotide
caguguggccagucccaaugaau

SEQ ID NO: 945 - RNA, 23 nt, Artificial Sequence
  Description of Artificial Sequence: Synthetic oligonucleotide
gagccaggccaugucagucaucc

SEQ ID NO: 946 - RNA, 23 nt, Artificial Sequence
  Description of Artificial Sequence: Synthetic oligonucleotide
gagccaggccaugucagucaucc

SEQ ID NO: 947 - RNA, 23 nt, Artificial Sequence
  Description of Artificial Sequence: Synthetic oligonucleotide
gagccaggccaugucagucaucc

SEQ ID NO: 948 - RNA, 23 nt, Artificial Sequence
  Description of Artificial Sequence: Synthetic oligonucleotide
caggccaugucagucauccauaa

SEQ ID NO: 949 - RNA, 23 nt, Artificial Sequence
  Description of Artificial Sequence: Synthetic oligonucleotide
uagaccuggaggccaccaaagcu

SEQ ID NO: 950 - RNA, 23 nt, Artificial Sequence
  Description of Artificial Sequence: Synthetic oligonucleotide
accuggaggccaccaaagcucga

SEQ ID NO: 951 - RNA, 23 nt, Artificial Sequence
  Description of Artificial Sequence: Synthetic oligonucleotide
uggaaacccaaaccagagaguug

SEQ ID NO: 952 - RNA, 23 nt, Artificial Sequence
  Description of Artificial Sequence: Synthetic oligonucleotide
uacagcaaccuccuccgagacaa

SEQ ID NO: 953 - RNA, 23 nt, Artificial Sequence
  Description of Artificial Sequence: Synthetic oligonucleotide
uacagcaaccuccuccgagacaa

SEQ ID NO: 954 - RNA, 23 nt, Artificial Sequence
  Description of Artificial Sequence: Synthetic oligonucleotide
cagcaaccuccuccgagacaagu

SEQ ID NO: 955 - RNA, 23 nt, Artificial Sequence
  Description of Artificial Sequence: Synthetic oligonucleotide
cagcaaccuccuccgagacaagu

SEQ ID NO: 956 - RNA, 23 nt, Artificial Sequence
  Description of Artificial Sequence: Synthetic oligonucleotide
cagcaaccuccuccgagacaagu

SEQ ID NO: 957 - RNA, 23 nt, Artificial Sequence
  Description of Artificial Sequence: Synthetic oligonucleotide
cgagacaagucaguucuggagga

SEQ ID NO: 958 - RNA, 23 nt, Artificial Sequence
  Description of Artificial Sequence: Synthetic oligonucleotide
gacaagucaguucuggaggaaga

SEQ ID NO: 959 - RNA, 23 nt, Artificial Sequence
  Description of Artificial Sequence: Synthetic oligonucleotide
aagucaguucuggaggaagagaa

SEQ ID NO: 960 - RNA, 23 nt, Artificial Sequence
  Description of Artificial Sequence: Synthetic oligonucleotide
ugagaaucuggccaggagguugg

SEQ ID NO: 961 - RNA, 23 nt, Artificial Sequence
  Description of Artificial Sequence: Synthetic oligonucleotide
ucuggccaggagguuggaaagca

SEQ ID NO: 962 - RNA, 23 nt, Artificial Sequence
  Description of Artificial Sequence: Synthetic oligonucleotide
ucuggccaggagguuggaaagca

SEQ ID NO: 963 - RNA, 23 nt, Artificial Sequence
  Description of Artificial Sequence: Synthetic oligonucleotide
agcagccaggagguagcaaggcu

SEQ ID NO: 964 - RNA, 23 nt, Artificial Sequence
  Description of Artificial Sequence: Synthetic oligonucleotide
ugugccaccaggcuccagagaag

SEQ ID NO: 965 - RNA, 23 nt, Artificial Sequence
  Description of Artificial Sequence: Synthetic oligonucleotide
ggaauuuggacacuuuggccuuc

SEQ ID NO: 966 - RNA, 23 nt, Artificial Sequence
  Description of Artificial Sequence: Synthetic oligonucleotide
ggaauuuggacacuuuggccuuc

SEQ ID NO: 967 - RNA, 23 nt, Artificial Sequence
  Description of Artificial Sequence: Synthetic oligonucleotide
ggacacuuuggccuuccaggaac

SEQ ID NO: 968 - RNA, 23 nt, Artificial Sequence
  Description of Artificial Sequence: Synthetic oligonucleotide
cacuuuggccuuccaggaacuga

SEQ ID NO: 969 - RNA, 23 nt, Artificial Sequence
  Description of Artificial Sequence: Synthetic oligonucleotide
ccaggaacugaaguccgagcuaa

SEQ ID NO: 970 - RNA, 23 nt, Artificial Sequence
  Description of Artificial Sequence: Synthetic oligonucleotide
ccaggaacugaaguccgagcuaa

SEQ ID NO: 971 - RNA, 23 nt, Artificial Sequence
  Description of Artificial Sequence: Synthetic oligonucleotide
cugaaguccgagcuaacugaagu

SEQ ID NO: 972 - RNA, 23 nt, Artificial Sequence
  Description of Artificial Sequence: Synthetic oligonucleotide
gagcuaacugaaguuccugcuuc

SEQ ID NO: 973 - RNA, 23 nt, Artificial Sequence
  Description of Artificial Sequence: Synthetic oligonucleotide
agcuaacugaaguuccugcuucc

SEQ ID NO: 974 - RNA, 23 nt, Artificial Sequence
  Description of Artificial Sequence: Synthetic oligonucleotide
cugaaguuccugcuucccgaauu

SEQ ID NO: 975 - RNA, 23 nt, Artificial Sequence
  Description of Artificial Sequence: Synthetic oligonucleotide
uggagaacuaguuuggguaggag

SEQ ID NO: 976 - RNA, 23 nt, Artificial Sequence
  Description of Artificial Sequence: Synthetic oligonucleotide
uggagaacuaguuuggguaggag

SEQ ID NO: 977 - RNA, 23 nt, Artificial Sequence
  Description of Artificial Sequence: Synthetic oligonucleotide
gaacuaguuuggguaggagagcc

SEQ ID NO: 978 - RNA, 22 nt, Artificial Sequence
  Description of Artificial Sequence: Synthetic oligonucleotide
gaacuaguuuggguaggagagc

SEQ ID NO: 979 - RNA, 23 nt, Artificial Sequence
  Description of Artificial Sequence: Synthetic oligonucleotide
uuggguaggagagccucucacgc

SEQ ID NO: 980 - RNA, 23 nt, Artificial Sequence
  Description of Artificial Sequence: Synthetic oligonucleotide
ggguaggagagccucucacgcug

SEQ ID NO: 981 - RNA, 23 nt, Artificial Sequence
  Description of Artificial Sequence: Synthetic oligonucleotide
ggguaggagagccucucacgcug

SEQ ID NO: 982 - RNA, 23 nt, Artificial Sequence
  Description of Artificial Sequence: Synthetic oligonucleotide
gguaggagagccucucacgcuga

SEQ ID NO: 983 - RNA, 23 nt, Artificial Sequence
  Description of Artificial Sequence: Synthetic oligonucleotide
guaggagagccucucacgcugag

SEQ ID NO: 984 - RNA, 23 nt, Artificial Sequence
  Description of Artificial Sequence: Synthetic oligonucleotide
gagccucucacgcugagaacagc

SEQ ID NO: 985 - RNA, 23 nt, Artificial Sequence
  Description of Artificial Sequence: Synthetic oligonucleotide
gagccucucacgcugagaacagc

SEQ ID NO: 986 - RNA, 23 nt, Artificial Sequence
  Description of Artificial Sequence: Synthetic oligonucleotide
gagccucucacgcugagaacagc

SEQ ID NO: 987 - RNA, 23 nt, Artificial Sequence
  Description of Artificial Sequence: Synthetic oligonucleotide
cucacgcugagaacagcagaaac

SEQ ID NO: 988 - RNA, 23 nt, Artificial Sequence
  Description of Artificial Sequence: Synthetic oligonucleotide
ucacgcugagaacagcagaaaca

SEQ ID NO: 989 - RNA, 23 nt, Artificial Sequence
  Description of Artificial Sequence: Synthetic oligonucleotide
cacgcugagaacagcagaaacaa

SEQ ID NO: 990 - RNA, 23 nt, Artificial Sequence
  Description of Artificial Sequence: Synthetic oligonucleotide
cacgcugagaacagcagaaacaa

SEQ ID NO: 991 - RNA, 23 nt, Artificial Sequence
  Description of Artificial Sequence: Synthetic oligonucleotide
acgcugagaacagcagaaacaau

SEQ ID NO: 992 - RNA, 23 nt, Artificial Sequence
  Description of Artificial Sequence: Synthetic oligonucleotide
cgcugagaacagcagaaacaauu

SEQ ID NO: 993 - RNA, 23 nt, Artificial Sequence
  Description of Artificial Sequence: Synthetic oligonucleotide
gcugagaacagcagaaacaauua

SEQ ID NO: 994 - RNA, 23 nt, Artificial Sequence
  Description of Artificial Sequence: Synthetic oligonucleotide
cugagaacagcagaaacaauuac

SEQ ID NO: 995 - RNA, 23 nt, Artificial Sequence
  Description of Artificial Sequence: Synthetic oligonucleotide
ugagaacagcagaaacaauuacu

SEQ ID NO: 996 - RNA, 23 nt, Artificial Sequence
  Description of Artificial Sequence: Synthetic oligonucleotide
ugagaacagcagaaacaauuacu

SEQ ID NO: 997 - RNA, 23 nt, Artificial Sequence
  Description of Artificial Sequence: Synthetic oligonucleotide
gagaacagcagaaacaauuacug

SEQ ID NO: 998 - RNA, 23 nt, Artificial Sequence
  Description of Artificial Sequence: Synthetic oligonucleotide
agaacagcagaaacaauuacugg

SEQ ID NO: 999 - RNA, 23 nt, Artificial Sequence
  Description of Artificial Sequence: Synthetic oligonucleotide
agaacagcagaaacaauuacugg

SEQ ID NO: 1000 - RNA, 23 nt, Artificial Sequence
  Description of Artificial Sequence: Synthetic oligonucleotide
agaacagcagaaacaauuacugg

SEQ ID NO: 1001 - RNA, 23 nt, Artificial Sequence
  Description of Artificial Sequence: Synthetic oligonucleotide
agaacagcagaaacaauuacugg

SEQ ID NO: 1002 - RNA, 23 nt, Artificial Sequence
  Description of Artificial Sequence: Synthetic oligonucleotide
agaacagcagaaacaauuacugg

SEQ ID NO: 1003 - RNA, 23 nt, Artificial Sequence
  Description of Artificial Sequence: Synthetic oligonucleotide
agaacagcagaaacaauuacugg

SEQ ID NO: 1004 - RNA, 23 nt, Artificial Sequence
  Description of Artificial Sequence: Synthetic oligonucleotide
agaacagcagaaacaauuacugg

SEQ ID NO: 1005 - RNA, 23 nt, Artificial Sequence
  Description of Artificial Sequence: Synthetic oligonucleotide
agaacagcagaaacaauuacugg

SEQ ID NO: 1006 - RNA, 23 nt, Artificial Sequence
  Description of Artificial Sequence: Synthetic oligonucleotide
gaacagcagaaacaauuacuggc

SEQ ID NO: 1007 - RNA, 21 nt, Artificial Sequence
  Description of Artificial Sequence: Synthetic oligonucleotide
aacagcagaaacaauuacugg

SEQ ID NO: 1008 - RNA, 23 nt, Artificial Sequence
  Description of Artificial Sequence: Synthetic oligonucleotide
aacagcagaaacaauuacuggca

SEQ ID NO: 1009 - RNA, 23 nt, Artificial Sequence
  Description of Artificial Sequence: Synthetic oligonucleotide
acagcagaaacaauuacuggcaa

SEQ ID NO: 1010 - RNA, 23 nt, Artificial Sequence
  Description of Artificial Sequence: Synthetic oligonucleotide
cagcagaaacaauuacuggcaag

SEQ ID NO: 1011 - RNA, 23 nt, Artificial Sequence
  Description of Artificial Sequence: Synthetic oligonucleotide
agcagaaacaauuacuggcaagu

SEQ ID NO: 1012 - RNA, 23 nt, Artificial Sequence
  Description of Artificial Sequence: Synthetic oligonucleotide
agcagaaacaauuacuggcaagu

SEQ ID NO: 1013 - RNA, 23 nt, Artificial Sequence
  Description of Artificial Sequence: Synthetic oligonucleotide
gcagaaacaauuacuggcaagua

SEQ ID NO: 1014 - RNA, 23 nt, Artificial Sequence
  Description of Artificial Sequence: Synthetic oligonucleotide
cagaaacaauuacuggcaaguau

SEQ ID NO: 1015 - RNA, 23 nt, Artificial Sequence
  Description of Artificial Sequence: Synthetic oligonucleotide
agaaacaauuacuggcaaguaug

SEQ ID NO: 1016 - RNA, 23 nt, Artificial Sequence
  Description of Artificial Sequence: Synthetic oligonucleotide
gaaacaauuacuggcaaguaugg

SEQ ID NO: 1017 - RNA, 23 nt, Artificial Sequence
  Description of Artificial Sequence: Synthetic oligonucleotide
gaaacaauuacuggcaaguaugg

SEQ ID NO: 1018 - RNA, 23 nt, Artificial Sequence
  Description of Artificial Sequence: Synthetic oligonucleotide
cuggcaaguaugguguguggaug

SEQ ID NO: 1019 - RNA, 23 nt, Artificial Sequence
  Description of Artificial Sequence: Synthetic oligonucleotide
cuggcaaguaugguguguggaug

SEQ ID NO: 1020 - RNA, 23 nt, Artificial Sequence
  Description of Artificial Sequence: Synthetic oligonucleotide
cuggcaaguaugguguguggaug

SEQ ID NO: 1021 - RNA, 23 nt, Artificial Sequence
  Description of Artificial Sequence: Synthetic oligonucleotide
ggcaaguaugguguguggaugcg

SEQ ID NO: 1022 - RNA, 23 nt, Artificial Sequence
  Description of Artificial Sequence: Synthetic oligonucleotide
ggcaaguaugguguguggaugcg

SEQ ID NO: 1023 - RNA, 23 nt, Artificial Sequence
  Description of Artificial Sequence: Synthetic oligonucleotide
uuugaguaugaccucaucagcca

SEQ ID NO: 1024 - RNA, 23 nt, Artificial Sequence
  Description of Artificial Sequence: Synthetic oligonucleotide
uugaguaugaccucaucagccag

SEQ ID NO: 1025 - RNA, 23 nt, Artificial Sequence
  Description of Artificial Sequence: Synthetic oligonucleotide
ugaguaugaccucaucagccagu

SEQ ID NO: 1026 - RNA, 23 nt, Artificial Sequence
  Description of Artificial Sequence: Synthetic oligonucleotide
gaguaugaccucaucagccaguu

SEQ ID NO: 1027 - RNA, 23 nt, Artificial Sequence
  Description of Artificial Sequence: Synthetic oligonucleotide
gaguaugaccucaucagccaguu

SEQ ID NO: 1028 - RNA, 23 nt, Artificial Sequence
  Description of Artificial Sequence: Synthetic oligonucleotide
aguaugaccucaucagccaguuu

SEQ ID NO: 1029 - RNA, 23 nt, Artificial Sequence
  Description of Artificial Sequence: Synthetic oligonucleotide
guaugaccucaucagccaguuua

SEQ ID NO: 1030 - RNA, 23 nt, Artificial Sequence
  Description of Artificial Sequence: Synthetic oligonucleotide
uaugaccucaucagccaguuuau

SEQ ID NO: 1031 - RNA, 23 nt, Artificial Sequence
  Description of Artificial Sequence: Synthetic oligonucleotide
augaccucaucagccaguuuaug

SEQ ID NO: 1032 - RNA, 23 nt, Artificial Sequence
  Description of Artificial Sequence: Synthetic oligonucleotide
ugaccucaucagccaguuuaugc

SEQ ID NO: 1033 - RNA, 23 nt, Artificial Sequence
  Description of Artificial Sequence: Synthetic oligonucleotide
gaccucaucagccaguuuaugca

SEQ ID NO: 1034 - RNA, 23 nt, Artificial Sequence
  Description of Artificial Sequence: Synthetic oligonucleotide
gaccucaucagccaguuuaugca

SEQ ID NO: 1035 - RNA, 23 nt, Artificial Sequence
  Description of Artificial Sequence: Synthetic oligonucleotide
gaccucaucagccaguuuaugca

SEQ ID NO: 1036 - RNA, 23 nt, Artificial Sequence
  Description of Artificial Sequence: Synthetic oligonucleotide
gaccucaucagccaguuuaugca

SEQ ID NO: 1037 - RNA, 23 nt, Artificial Sequence
  Description of Artificial Sequence: Synthetic oligonucleotide
gaccucaucagccaguuuaugca

SEQ ID NO: 1038 - RNA, 23 nt, Artificial Sequence
  Description of Artificial Sequence: Synthetic oligonucleotide
gaccucaucagccaguuuaugca

SEQ ID NO: 1039 - RNA, 23 nt, Artificial Sequence
  Description of Artificial Sequence: Synthetic oligonucleotide
gaccucaucagccaguuuaugca

SEQ ID NO: 1040 - RNA, 23 nt, Artificial Sequence
  Description of Artificial Sequence: Synthetic oligonucleotide
gaccucaucagccaguuuaugca

SEQ ID NO: 1041 - RNA, 23 nt, Artificial Sequence
  Description of Artificial Sequence: Synthetic oligonucleotide
gaccucaucagccaguuuaugca

SEQ ID NO: 1042 - RNA, 23 nt, Artificial Sequence
  Description of Artificial Sequence: Synthetic oligonucleotide
gaccucaucagccaguuuaugca

SEQ ID NO: 1043 - RNA, 23 nt, Artificial Sequence
  Description of Artificial Sequence: Synthetic oligonucleotide
gaccucaucagccaguuuaugca

SEQ ID NO: 1044 - RNA, 23 nt, Artificial Sequence
  Description of Artificial Sequence: Synthetic oligonucleotide
accucaucagccaguuuaugcag

SEQ ID NO: 1045 - RNA, 21 nt, Artificial Sequence
  Description of Artificial Sequence: Synthetic oligonucleotide
ccucaucagccaguuuaugca

SEQ ID NO: 1046 - RNA, 23 nt, Artificial Sequence
  Description of Artificial Sequence: Synthetic oligonucleotide
ccucaucagccaguuuaugcagg

SEQ ID NO: 1047 - RNA, 23 nt, Artificial Sequence
  Description of Artificial Sequence: Synthetic oligonucleotide
ccucaucagccaguuuaugcagg

SEQ ID NO: 1048 - RNA, 23 nt, Artificial Sequence
  Description of Artificial Sequence: Synthetic oligonucleotide
cucaucagccaguuuaugcaggg

SEQ ID NO: 1049 - RNA, 23 nt, Artificial Sequence
  Description of Artificial Sequence: Synthetic oligonucleotide
ucaucagccaguuuaugcagggc

SEQ ID NO: 1050 - RNA, 23 nt, Artificial Sequence
  Description of Artificial Sequence: Synthetic oligonucleotide
ucaucagccaguuuaugcagggc

SEQ ID NO: 1051 - RNA, 23 nt, Artificial Sequence
  Description of Artificial Sequence: Synthetic oligonucleotide
caucagccaguuuaugcagggcu

SEQ ID NO: 1052 - RNA, 23 nt, Artificial Sequence
  Description of Artificial Sequence: Synthetic oligonucleotide
aucagccaguuuaugcagggcua

SEQ ID NO: 1053 - RNA, 23 nt, Artificial Sequence
  Description of Artificial Sequence: Synthetic oligonucleotide
ucagccaguuuaugcagggcuac

SEQ ID NO: 1054 - RNA, 23 nt, Artificial Sequence
  Description of Artificial Sequence: Synthetic oligonucleotide
ucagccaguuuaugcagggcuac

SEQ ID NO: 1055 - RNA, 23 nt, Artificial Sequence
  Description of Artificial Sequence: Synthetic oligonucleotide
cagccaguuuaugcagggcuacc

SEQ ID NO: 1056 - RNA, 23 nt, Artificial Sequence
  Description of Artificial Sequence: Synthetic oligonucleotide
cagccaguuuaugcagggcuacc

SEQ ID NO: 1057 - RNA, 23 nt, Artificial Sequence
  Description of Artificial Sequence: Synthetic oligonucleotide
agccaguuuaugcagggcuaccc

SEQ ID NO: 1058 - RNA, 23 nt, Artificial Sequence
  Description of Artificial Sequence: Synthetic oligonucleotide
agccaguuuaugcagggcuaccc

SEQ ID NO: 1059 - RNA, 23 nt, Artificial Sequence
  Description of Artificial Sequence: Synthetic oligonucleotide
uaugcagggcuacccuucuaagg

SEQ ID NO: 1060 - RNA, 23 nt, Artificial Sequence
  Description of Artificial Sequence: Synthetic oligonucleotide
acgggugcugugguguacucggg

SEQ ID NO: 1061 - RNA, 23 nt, Artificial Sequence
  Description of Artificial Sequence: Synthetic oligonucleotide
acgggugcugugguguacucggg

SEQ ID NO: 1062 - RNA, 23 nt, Artificial Sequence
  Description of Artificial Sequence: Synthetic oligonucleotide
gggagccucuauuuccagggcgc

SEQ ID NO: 1063 - RNA, 23 nt, Artificial Sequence
  Description of Artificial Sequence: Synthetic oligonucleotide
gggagccucuauuuccagggcgc

SEQ ID NO: 1064 - RNA, 23 nt, Artificial Sequence
  Description of Artificial Sequence: Synthetic oligonucleotide
agccucuauuuccagggcgcuga

SEQ ID NO: 1065 - RNA, 23 nt, Artificial Sequence
  Description of Artificial Sequence: Synthetic oligonucleotide
auuuccagggcgcugaguccaga

SEQ ID NO: 1066 - RNA, 23 nt, Artificial Sequence
  Description of Artificial Sequence: Synthetic oligonucleotide
auuuccagggcgcugaguccaga

SEQ ID NO: 1067 - RNA, 23 nt, Artificial Sequence
  Description of Artificial Sequence: Synthetic oligonucleotide
auuuccagggcgcugaguccaga

SEQ ID NO: 1068 - RNA, 23 nt, Artificial Sequence
  Description of Artificial Sequence: Synthetic oligonucleotide
ccagggcgcugaguccagaacug

SEQ ID NO: 1069 - RNA, 23 nt, Artificial Sequence
  Description of Artificial Sequence: Synthetic oligonucleotide
cagggcgcugaguccagaacugu

SEQ ID NO: 1070 - RNA, 23 nt, Artificial Sequence
  Description of Artificial Sequence: Synthetic oligonucleotide
cagggcgcugaguccagaacugu

SEQ ID NO: 1071 - RNA, 23 nt, Artificial Sequence
  Description of Artificial Sequence: Synthetic oligonucleotide
cagggcgcugaguccagaacugu

SEQ ID NO: 1072 - RNA, 23 nt, Artificial Sequence
  Description of Artificial Sequence: Synthetic oligonucleotide
agggcgcugaguccagaacuguc

SEQ ID NO: 1073 - RNA, 23 nt, Artificial Sequence
  Description of Artificial Sequence: Synthetic oligonucleotide
gggcgcugaguccagaacuguca

SEQ ID NO: 1074 - RNA, 23 nt, Artificial Sequence
  Description of Artificial Sequence: Synthetic oligonucleotide
ggcgcugaguccagaacugucau

SEQ ID NO: 1075 - RNA, 23 nt, Artificial Sequence
  Description of Artificial Sequence: Synthetic oligonucleotide
gcgcugaguccagaacugucaua

SEQ ID NO: 1076 - RNA, 23 nt, Artificial Sequence
  Description of Artificial Sequence: Synthetic oligonucleotide
cgcugaguccagaacugucauaa

SEQ ID NO: 1077 - RNA, 23 nt, Artificial Sequence
  Description of Artificial Sequence: Synthetic oligonucleotide
cgcugaguccagaacugucauaa

SEQ ID NO: 1078 - RNA, 23 nt, Artificial Sequence
  Description of Artificial Sequence: Synthetic oligonucleotide
cgcugaguccagaacugucauaa

SEQ ID NO: 1079 - RNA, 23 nt, Artificial Sequence
  Description of Artificial Sequence: Synthetic oligonucleotide
gcugaguccagaacugucauaag

SEQ ID NO: 1080 - RNA, 23 nt, Artificial Sequence
  Description of Artificial Sequence: Synthetic oligonucleotide
cugaguccagaacugucauaaga

SEQ ID NO: 1081 - RNA, 23 nt, Artificial Sequence
  Description of Artificial Sequence: Synthetic oligonucleotide
cugaguccagaacugucauaaga

SEQ ID NO: 1082 - RNA, 23 nt, Artificial Sequence
  Description of Artificial Sequence: Synthetic oligonucleotide
ugaguccagaacugucauaagau

SEQ ID NO: 1083 - RNA, 23 nt, Artificial Sequence
  Description of Artificial Sequence: Synthetic oligonucleotide
ugaguccagaacugucauaagau

SEQ ID NO: 1084 - RNA, 23 nt, Artificial Sequence
  Description of Artificial Sequence: Synthetic oligonucleotide
gaguccagaacugucauaagaua

SEQ ID NO: 1085 - RNA, 23 nt, Artificial Sequence
  Description of Artificial Sequence: Synthetic oligonucleotide
gaguccagaacugucauaagaua

SEQ ID NO: 1086 - RNA, 23 nt, Artificial Sequence
  Description of Artificial Sequence: Synthetic oligonucleotide
gaguccagaacugucauaagaua

SEQ ID NO: 1087 - RNA, 23 nt, Artificial Sequence
  Description of Artificial Sequence: Synthetic oligonucleotide
gaguccagaacugucauaagaua

SEQ ID NO: 1088 - RNA, 23 nt, Artificial Sequence
  Description of Artificial Sequence: Synthetic oligonucleotide
gaguccagaacugucauaagaua

SEQ ID NO: 1089 - RNA, 23 nt, Artificial Sequence
  Description of Artificial Sequence: Synthetic oligonucleotide
gaguccagaacugucauaagaua

SEQ ID NO: 1090 - RNA, 23 nt, Artificial Sequence
  Description of Artificial Sequence: Synthetic oligonucleotide
gaguccagaacugucauaagaua

SEQ ID NO: 1091 - RNA, 23 nt, Artificial Sequence
  Description of Artificial Sequence: Synthetic oligonucleotide
gaguccagaacugucauaagaua

SEQ ID NO: 1092 - RNA, 23 nt, Artificial Sequence
  Description of Artificial Sequence: Synthetic oligonucleotide
gaguccagaacugucauaagaua

SEQ ID NO: 1093 - RNA, 23 nt, Artificial Sequence
  Description of Artificial Sequence: Synthetic oligonucleotide
gaguccagaacugucauaagaua

SEQ ID NO: 1094 - RNA, 23 nt, Artificial Sequence
  Description of Artificial Sequence: Synthetic oligonucleotide
aguccagaacugucauaagauau

SEQ ID NO: 1095 - RNA, 21 nt, Artificial Sequence
  Description of Artificial Sequence: Synthetic oligonucleotide
guccagaacugucauaagaua

SEQ ID NO: 1096 - RNA, 23 nt, Artificial Sequence
  Description of Artificial Sequence: Synthetic oligonucleotide
guccagaacugucauaagauaug

SEQ ID NO: 1097 - RNA, 23 nt, Artificial Sequence
  Description of Artificial Sequence: Synthetic oligonucleotide
uccagaacugucauaagauauga

SEQ ID NO: 1098 - RNA, 23 nt, Artificial Sequence
  Description of Artificial Sequence: Synthetic oligonucleotide
uccagaacugucauaagauauga

SEQ ID NO: 1099 - RNA, 23 nt, Artificial Sequence
  Description of Artificial Sequence: Synthetic oligonucleotide
uccagaacugucauaagauauga

SEQ ID NO: 1100 - RNA, 23 nt, Artificial Sequence
  Description of Artificial Sequence: Synthetic oligonucleotide
ccagaacugucauaagauaugag

SEQ ID NO: 1101 - RNA, 23 nt, Artificial Sequence
  Description of Artificial Sequence: Synthetic oligonucleotide
ccagaacugucauaagauaugag

SEQ ID NO: 1102 - RNA, 23 nt, Artificial Sequence
  Description of Artificial Sequence: Synthetic oligonucleotide
cagaacugucauaagauaugagc

SEQ ID NO: 1103 - RNA, 23 nt, Artificial Sequence
  Description of Artificial Sequence: Synthetic oligonucleotide
agaacugucauaagauaugagcu

SEQ ID NO: 1104 - RNA, 23 nt, Artificial Sequence
  Description of Artificial Sequence: Synthetic oligonucleotide
gaacugucauaagauaugagcug

SEQ ID NO: 1105 - RNA, 23 nt, Artificial Sequence
  Description of Artificial Sequence: Synthetic oligonucleotide
aacugucauaagauaugagcuga

SEQ ID NO: 1106 - RNA, 23 nt, Artificial Sequence
  Description of Artificial Sequence: Synthetic oligonucleotide
aacugucauaagauaugagcuga

SEQ ID NO: 1107 - RNA, 23 nt, Artificial Sequence
  Description of Artificial Sequence: Synthetic oligonucleotide
aacugucauaagauaugagcuga

SEQ ID NO: 1108 - RNA, 23 nt, Artificial Sequence
  Description of Artificial Sequence: Synthetic oligonucleotide
acugucauaagauaugagcugaa

SEQ ID NO: 1109 - RNA, 23 nt, Artificial Sequence
  Description of Artificial Sequence: Synthetic oligonucleotide
gucauaagauaugagcugaauac

SEQ ID NO: 1110 - RNA, 23 nt, Artificial Sequence
  Description of Artificial Sequence: Synthetic oligonucleotide
agcugaauaccgagacagugaag

SEQ ID NO: 1111 - RNA, 23 nt, Artificial Sequence
  Description of Artificial Sequence: Synthetic oligonucleotide
aauaccgagacagugaaggcuga

SEQ ID NO: 1112 - RNA, 23 nt, Artificial Sequence
  Description of Artificial Sequence: Synthetic oligonucleotide
aauaccgagacagugaaggcuga

SEQ ID NO: 1113 - RNA, 23 nt, Artificial Sequence
  Description of Artificial Sequence: Synthetic oligonucleotide
agacagugaaggcugagaaggaa

SEQ ID NO: 1114 - RNA, 23 nt, Artificial Sequence
  Description of Artificial Sequence: Synthetic oligonucleotide
agacagugaaggcugagaaggaa

SEQ ID NO: 1115 - RNA, 23 nt, Artificial Sequence
  Description of Artificial Sequence: Synthetic oligonucleotide
agacagugaaggcugagaaggaa

SEQ ID NO: 1116 - RNA, 23 nt, Artificial Sequence
  Description of Artificial Sequence: Synthetic oligonucleotide
gcugagaaggaaaucccuggagc

SEQ ID NO: 1117 - RNA, 23 nt, Artificial Sequence
  Description of Artificial Sequence: Synthetic oligonucleotide
aggccaaaggugccauuguccuc

SEQ ID NO: 1118 - RNA, 23 nt, Artificial Sequence
  Description of Artificial Sequence: Synthetic oligonucleotide
cuccaaacugaacccagagaauc

SEQ ID NO: 1119 - RNA, 23 nt, Artificial Sequence
  Description of Artificial Sequence: Synthetic oligonucleotide
cuccaaacugaacccagagaauc

SEQ ID NO: 1120 - RNA, 23 nt, Artificial Sequence
  Description of Artificial Sequence: Synthetic oligonucleotide
cuccaaacugaacccagagaauc

SEQ ID NO: 1121 - RNA, 23 nt, Artificial Sequence
  Description of Artificial Sequence: Synthetic oligonucleotide
uccaaacugaacccagagaaucu

SEQ ID NO: 1122 - RNA, 23 nt, Artificial Sequence
  Description of Artificial Sequence: Synthetic oligonucleotide
cauccguaagcagucagucgcca

SEQ ID NO: 1123 - RNA, 23 nt, Artificial Sequence
  Description of Artificial Sequence: Synthetic oligonucleotide
cauccguaagcagucagucgcca

SEQ ID NO: 1124 - RNA, 23 nt, Artificial Sequence
  Description of Artificial Sequence: Synthetic oligonucleotide
cauccguaagcagucagucgcca

SEQ ID NO: 1125 - RNA, 23 nt, Artificial Sequence
  Description of Artificial Sequence: Synthetic oligonucleotide
cauccguaagcagucagucgcca

SEQ ID NO: 1126 - RNA, 23 nt, Artificial Sequence
  Description of Artificial Sequence: Synthetic oligonucleotide
cguaagcagucagucgccaaugc

SEQ ID NO: 1127 - RNA, 23 nt, Artificial Sequence
  Description of Artificial Sequence: Synthetic oligonucleotide
agcagucagucgccaaugccuuc

SEQ ID NO: 1128 - RNA, 23 nt, Artificial Sequence
  Description of Artificial Sequence: Synthetic oligonucleotide
agucagucgccaaugccuucauc

SEQ ID NO: 1129 - RNA, 23 nt, Artificial Sequence
  Description of Artificial Sequence: Synthetic oligonucleotide
ucagucgccaaugccuucaucau

SEQ ID NO: 1130 - RNA, 23 nt, Artificial Sequence
  Description of Artificial Sequence: Synthetic oligonucleotide
ucgccaaugccuucaucaucugu

SEQ ID NO: 1131 - RNA, 23 nt, Artificial Sequence
  Description of Artificial Sequence: Synthetic oligonucleotide
ugccuucaucaucuguggcaccu

SEQ ID NO: 1132 - RNA, 23 nt, Artificial Sequence
  Description of Artificial Sequence: Synthetic oligonucleotide
ugccuucaucaucuguggcaccu

SEQ ID NO: 1133 - RNA, 23 nt, Artificial Sequence
  Description of Artificial Sequence: Synthetic oligonucleotide
aucuguggcaccuuguacaccgu

SEQ ID NO: 1134 - RNA, 23 nt, Artificial Sequence
  Description of Artificial Sequence: Synthetic oligonucleotide
ugcuaccgucaacuuugcuuaug

SEQ ID NO: 1135 - RNA, 23 nt, Artificial Sequence
  Description of Artificial Sequence: Synthetic oligonucleotide
ugcuaccgucaacuuugcuuaug

SEQ ID NO: 1136 - RNA, 23 nt, Artificial Sequence
  Description of Artificial Sequence: Synthetic oligonucleotide
gcuaccgucaacuuugcuuauga

SEQ ID NO: 1137 - RNA, 23 nt, Artificial Sequence
  Description of Artificial Sequence: Synthetic oligonucleotide
gcuaccgucaacuuugcuuauga

SEQ ID NO: 1138 - RNA, 23 nt, Artificial Sequence
  Description of Artificial Sequence: Synthetic oligonucleotide
gcuaccgucaacuuugcuuauga

SEQ ID NO: 1139 - RNA, 23 nt, Artificial Sequence
  Description of Artificial Sequence: Synthetic oligonucleotide
gcuaccgucaacuuugcuuauga

SEQ ID NO: 1140 - RNA, 23 nt, Artificial Sequence
  Description of Artificial Sequence: Synthetic oligonucleotide
gcuaccgucaacuuugcuuauga

SEQ ID NO: 1141 - RNA, 23 nt, Artificial Sequence
  Description of Artificial Sequence: Synthetic oligonucleotide
gcuaccgucaacuuugcuuauga

SEQ ID NO: 1142 - RNA, 23 nt, Artificial Sequence
  Description of Artificial Sequence: Synthetic oligonucleotide
gcuaccgucaacuuugcuuauga

SEQ ID NO: 1143 - RNA, 23 nt, Artificial Sequence
  Description of Artificial Sequence: Synthetic oligonucleotide
gcuaccgucaacuuugcuuauga

SEQ ID NO: 1144 - RNA, 23 nt, Artificial Sequence
  Description of Artificial Sequence: Synthetic oligonucleotide
gcuaccgucaacuuugcuuauga

SEQ ID NO: 1145 - RNA, 23 nt, Artificial Sequence
  Description of Artificial Sequence: Synthetic oligonucleotide
gcuaccgucaacuuugcuuauga

SEQ ID NO: 1146 - RNA, 23 nt, Artificial Sequence
  Description of Artificial Sequence: Synthetic oligonucleotide
cuaccgucaacuuugcuuaugac

SEQ ID NO: 1147 - RNA, 23 nt, Artificial Sequence
  Description of Artificial Sequence: Synthetic oligonucleotide
cuaccgucaacuuugcuuaugac

SEQ ID NO: 1148 - RNA, 21 nt, Artificial Sequence
  Description of Artificial Sequence: Synthetic oligonucleotide
uaccgucaacuuugcuuauga

SEQ ID NO: 1149 - RNA, 23 nt, Artificial Sequence
  Description of Artificial Sequence: Synthetic oligonucleotide
uaccgucaacuuugcuuaugaca

SEQ ID NO: 1150 - RNA, 23 nt, Artificial Sequence
  Description of Artificial Sequence: Synthetic oligonucleotide
accgucaacuuugcuuaugacac

SEQ ID NO: 1151 - RNA, 23 nt, Artificial Sequence
  Description of Artificial Sequence: Synthetic oligonucleotide
ccgucaacuuugcuuaugacaca

SEQ ID NO: 1152 - RNA, 23 nt, Artificial Sequence
  Description of Artificial Sequence: Synthetic oligonucleotide
cgucaacuuugcuuaugacacag

SEQ ID NO: 1153 - RNA, 23 nt, Artificial Sequence
  Description of Artificial Sequence: Synthetic oligonucleotide
cgucaacuuugcuuaugacacag

SEQ ID NO: 1154 - RNA, 23 nt, Artificial Sequence
  Description of Artificial Sequence: Synthetic oligonucleotide
gucaacuuugcuuaugacacagg

SEQ ID NO: 1155 - RNA, 23 nt, Artificial Sequence
  Description of Artificial Sequence: Synthetic oligonucleotide
ucaacuuugcuuaugacacaggc

SEQ ID NO: 1156 - RNA, 23 nt, Artificial Sequence
  Description of Artificial Sequence: Synthetic oligonucleotide
caacuuugcuuaugacacaggca

SEQ ID NO: 1157 - RNA, 23 nt, Artificial Sequence
  Description of Artificial Sequence: Synthetic oligonucleotide
aacuuugcuuaugacacaggcac

SEQ ID NO: 1158 - RNA, 23 nt, Artificial Sequence
  Description of Artificial Sequence: Synthetic oligonucleotide
acacaggcacagguaucagcaag

SEQ ID NO: 1159 - RNA, 23 nt, Artificial Sequence
  Description of Artificial Sequence: Synthetic oligonucleotide
cuauaaguacagcagcaugauug

SEQ ID NO: 1160 - RNA, 23 nt, Artificial Sequence
  Description of Artificial Sequence: Synthetic oligonucleotide
uauaaguacagcagcaugauuga

SEQ ID NO: 1161 - RNA, 23 nt, Artificial Sequence
  Description of Artificial Sequence: Synthetic oligonucleotide
auaaguacagcagcaugauugac

SEQ ID NO: 1162 - RNA, 23 nt, Artificial Sequence
  Description of Artificial Sequence: Synthetic oligonucleotide
auaaguacagcagcaugauugac

SEQ ID NO: 1163 - RNA, 23 nt, Artificial Sequence
  Description of Artificial Sequence: Synthetic oligonucleotide
auaaguacagcagcaugauugac

SEQ ID NO: 1164 - RNA, 23 nt, Artificial Sequence
  Description of Artificial Sequence: Synthetic oligonucleotide
uaaguacagcagcaugauugacu

SEQ ID NO: 1165 - RNA, 23 nt, Artificial Sequence
  Description of Artificial Sequence: Synthetic oligonucleotide
uaaguacagcagcaugauugacu

SEQ ID NO: 1166 - RNA, 23 nt, Artificial Sequence
  Description of Artificial Sequence: Synthetic oligonucleotide
aaguacagcagcaugauugacua

SEQ ID NO: 1167 - RNA, 23 nt, Artificial Sequence
  Description of Artificial Sequence: Synthetic oligonucleotide
aaguacagcagcaugauugacua

SEQ ID NO: 1168 - RNA, 23 nt, Artificial Sequence
  Description of Artificial Sequence: Synthetic oligonucleotide
aaguacagcagcaugauugacua

SEQ ID NO: 1169 - RNA, 23 nt, Artificial Sequence
  Description of Artificial Sequence: Synthetic oligonucleotide
aaguacagcagcaugauugacua

SEQ ID NO: 1170 - RNA, 23 nt, Artificial Sequence
  Description of Artificial Sequence: Synthetic oligonucleotide
aaguacagcagcaugauugacua

SEQ ID NO: 1171 - RNA, 23 nt, Artificial Sequence
  Description of Artificial Sequence: Synthetic oligonucleotide
aaguacagcagcaugauugacua

SEQ ID NO: 1172 - RNA, 23 nt, Artificial Sequence
  Description of Artificial Sequence: Synthetic oligonucleotide
aaguacagcagcaugauugacua

SEQ ID NO: 1173 - RNA, 23 nt, Artificial Sequence
  Description of Artificial Sequence: Synthetic oligonucleotide
aaguacagcagcaugauugacua

SEQ ID NO: 1174 - RNA, 23 nt, Artificial Sequence
  Description of Artificial Sequence: Synthetic oligonucleotide
aaguacagcagcaugauugacua

SEQ ID NO: 1175 - RNA, 23 nt, Artificial Sequence
  Description of Artificial Sequence: Synthetic oligonucleotide
aaguacagcagcaugauugacua

SEQ ID NO: 1176 - RNA, 23 nt, Artificial Sequence
  Description of Artificial Sequence: Synthetic oligonucleotide
aguacagcagcaugauugacuac

SEQ ID NO: 1177 - RNA, 21 nt, Artificial Sequence
  Description of Artificial Sequence: Synthetic oligonucleotide
guacagcagcaugauugacua

SEQ ID NO: 1178 - RNA, 23 nt, Artificial Sequence
  Description of Artificial Sequence: Synthetic oligonucleotide
guacagcagcaugauugacuaca

SEQ ID NO: 1179 - RNA, 23 nt, Artificial Sequence
  Description of Artificial Sequence: Synthetic oligonucleotide
guacagcagcaugauugacuaca

SEQ ID NO: 1180 - RNA, 23 nt, Artificial Sequence
  Description of Artificial Sequence: Synthetic oligonucleotide
guacagcagcaugauugacuaca

SEQ ID NO: 1181 - RNA, 23 nt, Artificial Sequence
  Description of Artificial Sequence: Synthetic oligonucleotide
uacagcagcaugauugacuacaa

SEQ ID NO: 1182 - RNA, 23 nt, Artificial Sequence
  Description of Artificial Sequence: Synthetic oligonucleotide
acagcagcaugauugacuacaac

SEQ ID NO: 1183 - RNA, 23 nt, Artificial Sequence
  Description of Artificial Sequence: Synthetic oligonucleotide
cagcagcaugauugacuacaacc

SEQ ID NO: 1184 - RNA, 23 nt, Artificial Sequence
  Description of Artificial Sequence: Synthetic oligonucleotide
agcagcaugauugacuacaaccc

SEQ ID NO: 1185 - RNA, 23 nt, Artificial Sequence
  Description of Artificial Sequence: Synthetic oligonucleotide
cagcaugauugacuacaaccccc

SEQ ID NO: 1186 - RNA, 23 nt, Artificial Sequence
  Description of Artificial Sequence: Synthetic oligonucleotide
gaagcucuuugccugggacaacu

SEQ ID NO: 1187 - RNA, 23 nt, Artificial Sequence
  Description of Artificial Sequence: Synthetic oligonucleotide
gaagcucuuugccugggacaacu

SEQ ID NO: 1188 - RNA, 23 nt, Artificial Sequence
  Description of Artificial Sequence: Synthetic oligonucleotide
uugccugggacaacuugaacaug

SEQ ID NO: 1189 - RNA, 23 nt, Artificial Sequence
  Description of Artificial Sequence: Synthetic oligonucleotide
uugccugggacaacuugaacaug

SEQ ID NO: 1190 - RNA, 23 nt, Artificial Sequence
  Description of Artificial Sequence: Synthetic oligonucleotide
uugccugggacaacuugaacaug

SEQ ID NO: 1191 - RNA, 23 nt, Artificial Sequence
  Description of Artificial Sequence: Synthetic oligonucleotide
gccugggacaacuugaacauggu

SEQ ID NO: 1192 - RNA, 23 nt, Artificial Sequence
  Description of Artificial Sequence: Synthetic oligonucleotide
ccugggacaacuugaacaugguc

SEQ ID NO: 1193 - RNA, 23 nt, Artificial Sequence
  Description of Artificial Sequence: Synthetic oligonucleotide
cugggacaacuugaacaugguca

SEQ ID NO: 1194 - RNA, 23 nt, Artificial Sequence
  Description of Artificial Sequence: Synthetic oligonucleotide
cugggacaacuugaacaugguca

SEQ ID NO: 1195 - RNA, 23 nt, Artificial Sequence
  Description of Artificial Sequence: Synthetic oligonucleotide
ugggacaacuugaacauggucac

SEQ ID NO: 1196 - RNA, 23 nt, Artificial Sequence
  Description of Artificial Sequence: Synthetic oligonucleotide
gggacaacuugaacauggucacu

SEQ ID NO: 1197 - RNA, 23 nt, Artificial Sequence
  Description of Artificial Sequence: Synthetic oligonucleotide
gggacaacuugaacauggucacu

SEQ ID NO: 1198 - RNA, 23 nt, Artificial Sequence
  Description of Artificial Sequence: Synthetic oligonucleotide
ggacaacuugaacauggucacuu

SEQ ID NO: 1199 - RNA, 23 nt, Artificial Sequence
  Description of Artificial Sequence: Synthetic oligonucleotide
ggacaacuugaacauggucacuu

SEQ ID NO: 1200 - RNA, 23 nt, Artificial Sequence
  Description of Artificial Sequence: Synthetic oligonucleotide
gacaacuugaacauggucacuua

SEQ ID NO: 1201 - RNA, 23 nt, Artificial Sequence
  Description of Artificial Sequence: Synthetic oligonucleotide
acaacuugaacauggucacuuau

SEQ ID NO: 1202 - RNA, 23 nt, Artificial Sequence
  Description of Artificial Sequence: Synthetic oligonucleotide
caacuugaacauggucacuuaug

SEQ ID NO: 1203 - RNA, 23 nt, Artificial Sequence
  Description of Artificial Sequence: Synthetic oligonucleotide
aacuugaacauggucacuuauga

SEQ ID NO: 1204 - RNA, 23 nt, Artificial Sequence
  Description of Artificial Sequence: Synthetic oligonucleotide
aacuugaacauggucacuuauga

SEQ ID NO: 1205 - RNA, 23 nt, Artificial Sequence
  Description of Artificial Sequence: Synthetic oligonucleotide
aacuugaacauggucacuuauga

SEQ ID NO: 1206 - RNA, 23 nt, Artificial Sequence
  Description of Artificial Sequence: Synthetic oligonucleotide
aacuugaacauggucacuuauga

SEQ ID NO: 1207 - RNA, 23 nt, Artificial Sequence
  Description of Artificial Sequence: Synthetic oligonucleotide
aacuugaacauggucacuuauga

SEQ ID NO: 1208 - RNA, 23 nt, Artificial Sequence
  Description of Artificial Sequence: Synthetic oligonucleotide
aacuugaacauggucacuuauga

SEQ ID NO: 1209 - RNA, 23 nt, Artificial Sequence
  Description of Artificial Sequence: Synthetic oligonucleotide
aacuugaacauggucacuuauga

SEQ ID NO: 1210 - RNA, 23 nt, Artificial Sequence
  Description of Artificial Sequence: Synthetic oligonucleotide
aacuugaacauggucacuuauga

SEQ ID NO: 1211 - RNA, 23 nt, Artificial Sequence
  Description of Artificial Sequence: Synthetic oligonucleotide
aacuugaacauggucacuuauga

SEQ ID NO: 1212 - RNA, 23 nt, Artificial Sequence
  Description of Artificial Sequence: Synthetic oligonucleotide
aacuugaacauggucacuuauga

SEQ ID NO: 1213 - RNA, 23 nt, Artificial Sequence
  Description of Artificial Sequence: Synthetic oligonucleotide
acuugaacauggucacuuaugac

SEQ ID NO: 1214 - RNA, 23 nt, Artificial Sequence
  Description of Artificial Sequence: Synthetic oligonucleotide
acuugaacauggucacuuaugac

SEQ ID NO: 1215 - RNA, 23 nt, Artificial Sequence
  Description of Artificial Sequence: Synthetic oligonucleotide
acuugaacauggucacuuaugac

SEQ ID NO: 1216 - RNA, 23 nt, Artificial Sequence
  Description of Artificial Sequence: Synthetic oligonucleotide
acuugaacauggucacuuaugac

SEQ ID NO: 1217 - RNA, 23 nt, Artificial Sequence
  Description of Artificial Sequence: Synthetic oligonucleotide
acuugaacauggucacuuaugac

SEQ ID NO: 1218 - RNA, 23 nt, Artificial Sequence
  Description of Artificial Sequence: Synthetic oligonucleotide
acuugaacauggucacuuaugac

SEQ ID NO: 1219 - RNA, 23 nt, Artificial Sequence
  Description of Artificial Sequence: Synthetic oligonucleotide
acuugaacauggucacuuaugac

SEQ ID NO: 1220 - RNA, 23 nt, Artificial Sequence
  Description of Artificial Sequence: Synthetic oligonucleotide
acuugaacauggucacuuaugac

SEQ ID NO: 1221 - RNA, 23 nt, Artificial Sequence
  Description of Artificial Sequence: Synthetic oligonucleotide
acuugaacauggucacuuaugac

SEQ ID NO: 1222 - RNA, 21 nt, Artificial Sequence
  Description of Artificial Sequence: Synthetic oligonucleotide
cuugaacauggucacuuauga

SEQ ID NO: 1223 - RNA, 23 nt, Artificial Sequence
  Description of Artificial Sequence: Synthetic oligonucleotide
cuugaacauggucacuuaugaca

SEQ ID NO: 1224 - RNA, 21 nt, Artificial Sequence
  Description of Artificial Sequence: Synthetic oligonucleotide
uugaacauggucacuuaugac

SEQ ID NO: 1225 - RNA, 23 nt, Artificial Sequence
  Description of Artificial Sequence: Synthetic oligonucleotide
uugaacauggucacuuaugacau

SEQ ID NO: 1226 - RNA, 23 nt, Artificial Sequence
  Description of Artificial Sequence: Synthetic oligonucleotide
ugaacauggucacuuaugacauc

SEQ ID NO: 1227 - RNA, 23 nt, Artificial Sequence
  Description of Artificial Sequence: Synthetic oligonucleotide
gaacauggucacuuaugacauca

SEQ ID NO: 1228 - RNA, 23 nt, Artificial Sequence
  Description of Artificial Sequence: Synthetic oligonucleotide
gaacauggucacuuaugacauca

SEQ ID NO: 1229 - RNA, 23 nt, Artificial Sequence
  Description of Artificial Sequence: Synthetic oligonucleotide
gaacauggucacuuaugacauca

SEQ ID NO: 1230 - RNA, 23 nt, Artificial Sequence
  Description of Artificial Sequence: Synthetic oligonucleotide
aacauggucacuuaugacaucaa

SEQ ID NO: 1231 - RNA, 23 nt, Artificial Sequence
  Description of Artificial Sequence: Synthetic oligonucleotide
acauggucacuuaugacaucaag

SEQ ID NO: 1232 - RNA, 23 nt, Artificial Sequence
  Description of Artificial Sequence: Synthetic oligonucleotide
cauggucacuuaugacaucaagc

SEQ ID NO: 1233 - RNA, 23 nt, Artificial Sequence
  Description of Artificial Sequence: Synthetic oligonucleotide
auggucacuuaugacaucaagcu

SEQ ID NO: 1234 - RNA, 23 nt, Artificial Sequence
  Description of Artificial Sequence: Synthetic oligonucleotide
uggucacuuaugacaucaagcuc

SEQ ID NO: 1235 - RNA, 23 nt, Artificial Sequence
  Description of Artificial Sequence: Synthetic oligonucleotide
uggcagaaggagaugcucagggc

SEQ ID NO: 1236 - RNA, 23 nt, Artificial Sequence
  Description of Artificial Sequence: Synthetic oligonucleotide
ugaagggagagccagccagccag

SEQ ID NO: 1237 - RNA, 23 nt, Artificial Sequence
  Description of Artificial Sequence: Synthetic oligonucleotide
aggaugaacauggucaccaucua

SEQ ID NO: 1238 - RNA, 23 nt, Artificial Sequence
  Description of Artificial Sequence: Synthetic oligonucleotide
cagcauuuaugggauguuuaaug

SEQ ID NO: 1239 - RNA, 23 nt, Artificial Sequence
  Description of Artificial Sequence: Synthetic oligonucleotide
gauguuuaaugacauaguucaag

SEQ ID NO: 1240 - RNA, 23 nt, Artificial Sequence
  Description of Artificial Sequence: Synthetic oligonucleotide
gauguuuaaugacauaguucaag

SEQ ID NO: 1241 - RNA, 23 nt, Artificial Sequence
  Description of Artificial Sequence: Synthetic oligonucleotide
gauguuuaaugacauaguucaag

SEQ ID NO: 1242 - RNA, 23 nt, Artificial Sequence
  Description of Artificial Sequence: Synthetic oligonucleotide
auguuuaaugacauaguucaagu

SEQ ID NO: 1243 - RNA, 23 nt, Artificial Sequence
  Description of Artificial Sequence: Synthetic oligonucleotide
auguuuaaugacauaguucaagu

SEQ ID NO: 1244 - RNA, 23 nt, Artificial Sequence
  Description of Artificial Sequence: Synthetic oligonucleotide
uguuuaaugacauaguucaaguu

SEQ ID NO: 1245 - RNA, 23 nt, Artificial Sequence
  Description of Artificial Sequence: Synthetic oligonucleotide
guuuaaugacauaguucaaguuu

SEQ ID NO: 1246 - RNA, 23 nt, Artificial Sequence
  Description of Artificial Sequence: Synthetic oligonucleotide
uuuaaugacauaguucaaguuuu

SEQ ID NO: 1247 - RNA, 23 nt, Artificial Sequence
  Description of Artificial Sequence: Synthetic oligonucleotide
uuuaaugacauaguucaaguuuu

SEQ ID NO: 1248 - RNA, 23 nt, Artificial Sequence
  Description of Artificial Sequence: Synthetic oligonucleotide
uuaaugacauaguucaaguuuuc

SEQ ID NO: 1249 - RNA, 23 nt, Artificial Sequence
  Description of Artificial Sequence: Synthetic oligonucleotide
uuaaugacauaguucaaguuuuc

SEQ ID NO: 1250 - RNA, 23 nt, Artificial Sequence
  Description of Artificial Sequence: Synthetic oligonucleotide
uaaugacauaguucaaguuuucu

SEQ ID NO: 1251 - RNA, 23 nt, Artificial Sequence
  Description of Artificial Sequence: Synthetic oligonucleotide
aaugacauaguucaaguuuucuu

SEQ ID NO: 1252 - RNA, 23 nt, Artificial Sequence
  Description of Artificial Sequence: Synthetic oligonucleotide
augacauaguucaaguuuucuug

SEQ ID NO: 1253 - RNA, 23 nt, Artificial Sequence
  Description of Artificial Sequence: Synthetic oligonucleotide
ugacauaguucaaguuuucuugu

SEQ ID NO: 1254 - RNA, 23 nt, Artificial Sequence
  Description of Artificial Sequence: Synthetic oligonucleotide
ugacauaguucaaguuuucuugu

SEQ ID NO: 1255 - RNA, 23 nt, Artificial Sequence
  Description of Artificial Sequence: Synthetic oligonucleotide
ugacauaguucaaguuuucuugu

SEQ ID NO: 1256 - RNA, 23 nt, Artificial Sequence
  Description of Artificial Sequence: Synthetic oligonucleotide
ugacauaguucaaguuuucuugu

SEQ ID NO: 1257 - RNA, 23 nt, Artificial Sequence
  Description of Artificial Sequence: Synthetic oligonucleotide
ugacauaguucaaguuuucuugu

SEQ ID NO: 1258 - RNA, 23 nt, Artificial Sequence
  Description of Artificial Sequence: Synthetic oligonucleotide
ugacauaguucaaguuuucuugu

SEQ ID NO: 1259 - RNA, 23 nt, Artificial Sequence
  Description of Artificial Sequence: Synthetic oligonucleotide
ugacauaguucaaguuuucuugu

SEQ ID NO: 1260 - RNA, 23 nt, Artificial Sequence
  Description of Artificial Sequence: Synthetic oligonucleotide
ugacauaguucaaguuuucuugu

SEQ ID NO: 1261 - RNA, 23 nt, Artificial Sequence
  Description of Artificial Sequence: Synthetic oligonucleotide
gacauaguucaaguuuucuugug

SEQ ID NO: 1262 - RNA, 21 nt, Artificial Sequence
  Description of Artificial Sequence: Synthetic oligonucleotide
acauaguucaaguuuucuugu

SEQ ID NO: 1263 - RNA, 21 nt, Artificial Sequence
  Description of Artificial Sequence: Synthetic oligonucleotide
acauaguucaaguuuucuugu

SEQ ID NO: 1264 - RNA, 23 nt, Artificial Sequence
  Description of Artificial Sequence: Synthetic oligonucleotide
acauaguucaaguuuucuuguga

SEQ ID NO: 1265 - RNA, 23 nt, Artificial Sequence
  Description of Artificial Sequence: Synthetic oligonucleotide
cauaguucaaguuuucuugugau

SEQ ID NO: 1266 - RNA, 23 nt, Artificial Sequence
  Description of Artificial Sequence: Synthetic oligonucleotide
cauaguucaaguuuucuugugau

SEQ ID NO: 1267 - RNA, 23 nt, Artificial Sequence
  Description of Artificial Sequence: Synthetic oligonucleotide
auaguucaaguuuucuugugauu

SEQ ID NO: 1268 - RNA, 23 nt, Artificial Sequence
  Description of Artificial Sequence: Synthetic oligonucleotide
auaguucaaguuuucuugugauu

SEQ ID NO: 1269 - RNA, 23 nt, Artificial Sequence
  Description of Artificial Sequence: Synthetic oligonucleotide
uaguucaaguuuucuugugauuu

SEQ ID NO: 1270 - RNA, 23 nt, Artificial Sequence
  Description of Artificial Sequence: Synthetic oligonucleotide
uaguucaaguuuucuugugauuu

SEQ ID NO: 1271 - RNA, 23 nt, Artificial Sequence
  Description of Artificial Sequence: Synthetic oligonucleotide
aguucaaguuuucuugugauuug

SEQ ID NO: 1272 - RNA, 23 nt, Artificial Sequence
  Description of Artificial Sequence: Synthetic oligonucleotide
guucaaguuuucuugugauuugg

SEQ ID NO: 1273 - RNA, 23 nt, Artificial Sequence
  Description of Artificial Sequence: Synthetic oligonucleotide
guucaaguuuucuugugauuugg

SEQ ID NO: 1274 - RNA, 23 nt, Artificial Sequence
  Description of Artificial Sequence: Synthetic oligonucleotide
guucaaguuuucuugugauuugg

SEQ ID NO: 1275 - RNA, 23 nt, Artificial Sequence
  Description of Artificial Sequence: Synthetic oligonucleotide
guucaaguuuucuugugauuugg

SEQ ID NO: 1276 - RNA, 23 nt, Artificial Sequence
  Description of Artificial Sequence: Synthetic oligonucleotide
uucaaguuuucuugugauuuggg

SEQ ID NO: 1277 - RNA, 23 nt, Artificial Sequence
  Description of Artificial Sequence: Synthetic oligonucleotide
ucaaguuuucuugugauuugggg

SEQ ID NO: 1278 - RNA, 23 nt, Artificial Sequence
  Description of Artificial Sequence: Synthetic oligonucleotide
ccugaaaaccauugcucuugcau

SEQ ID NO: 1279 - RNA, 23 nt, Artificial Sequence
  Description of Artificial Sequence: Synthetic oligonucleotide
cugaaaaccauugcucuugcaug

SEQ ID NO: 1280 - RNA, 23 nt, Artificial Sequence
  Description of Artificial Sequence: Synthetic oligonucleotide
cugaaaaccauugcucuugcaug

SEQ ID NO: 1281 - RNA, 23 nt, Artificial Sequence
  Description of Artificial Sequence: Synthetic oligonucleotide
ugaaaaccauugcucuugcaugu

SEQ ID NO: 1282 - RNA, 23 nt, Artificial Sequence
  Description of Artificial Sequence: Synthetic oligonucleotide
ugaaaaccauugcucuugcaugu

SEQ ID NO: 1283 - RNA, 23 nt, Artificial Sequence
  Description of Artificial Sequence: Synthetic oligonucleotide
gaaaaccauugcucuugcauguu

SEQ ID NO: 1284 - RNA, 23 nt, Artificial Sequence
  Description of Artificial Sequence: Synthetic oligonucleotide
gaaaaccauugcucuugcauguu

SEQ ID NO: 1285 - RNA, 23 nt, Artificial Sequence
  Description of Artificial Sequence: Synthetic oligonucleotide
aaaaccauugcucuugcauguua

SEQ ID NO: 1286 - RNA, 23 nt, Artificial Sequence
  Description of Artificial Sequence: Synthetic oligonucleotide
aaaccauugcucuugcauguuac

SEQ ID NO: 1287 - RNA, 23 nt, Artificial Sequence
  Description of Artificial Sequence: Synthetic oligonucleotide
aaccauugcucuugcauguuaca

SEQ ID NO: 1288 - RNA, 23 nt, Artificial Sequence
  Description of Artificial Sequence: Synthetic oligonucleotide
accauugcucuugcauguuacau

SEQ ID NO: 1289 - RNA, 23 nt, Artificial Sequence
  Description of Artificial Sequence: Synthetic oligonucleotide
accauugcucuugcauguuacau

SEQ ID NO: 1290 - RNA, 23 nt, Artificial Sequence
  Description of Artificial Sequence: Synthetic oligonucleotide
ccauugcucuugcauguuacaug

SEQ ID NO: 1291 - RNA, 23 nt, Artificial Sequence
  Description of Artificial Sequence: Synthetic oligonucleotide
cauugcucuugcauguuacaugg

SEQ ID NO: 1292 - RNA, 23 nt, Artificial Sequence
  Description of Artificial Sequence: Synthetic oligonucleotide
cauugcucuugcauguuacaugg

SEQ ID NO: 1293 - RNA, 23 nt, Artificial Sequence
  Description of Artificial Sequence: Synthetic oligonucleotide
cauugcucuugcauguuacaugg

SEQ ID NO: 1294 - RNA, 23 nt, Artificial Sequence
  Description of Artificial Sequence: Synthetic oligonucleotide
cauugcucuugcauguuacaugg

SEQ ID NO: 1295 - RNA, 23 nt, Artificial Sequence
  Description of Artificial Sequence: Synthetic oligonucleotide
cauugcucuugcauguuacaugg

SEQ ID NO: 1296 - RNA, 23 nt, Artificial Sequence
  Description of Artificial Sequence: Synthetic oligonucleotide
cauugcucuugcauguuacaugg

SEQ ID NO: 1297 - RNA, 23 nt, Artificial Sequence
  Description of Artificial Sequence: Synthetic oligonucleotide
cauugcucuugcauguuacaugg

SEQ ID NO: 1298 - RNA, 23 nt, Artificial Sequence
  Description of Artificial Sequence: Synthetic oligonucleotide
cauugcucuugcauguuacaugg

SEQ ID NO: 1299 - RNA, 23 nt, Artificial Sequence
  Description of Artificial Sequence: Synthetic oligonucleotide
auugcucuugcauguuacauggu

SEQ ID NO: 1300 - RNA, 21 nt, Artificial Sequence
  Description of Artificial Sequence: Synthetic oligonucleotide
uugcucuugcauguuacaugg

SEQ ID NO: 1301 - RNA, 23 nt, Artificial Sequence
  Description of Artificial Sequence: Synthetic oligonucleotide
uugcucuugcauguuacaugguu

SEQ ID NO: 1302 - RNA, 23 nt, Artificial Sequence
  Description of Artificial Sequence: Synthetic oligonucleotide
ugcucuugcauguuacaugguua

SEQ ID NO: 1303 - RNA, 23 nt, Artificial Sequence
  Description of Artificial Sequence: Synthetic oligonucleotide
ugcucuugcauguuacaugguua

SEQ ID NO: 1304 - RNA, 23 nt, Artificial Sequence
  Description of Artificial Sequence: Synthetic oligonucleotide
gcucuugcauguuacaugguuac

SEQ ID NO: 1305 - RNA, 23 nt, Artificial Sequence
  Description of Artificial Sequence: Synthetic oligonucleotide
cucuugcauguuacaugguuacc

SEQ ID NO: 1306 - RNA, 23 nt, Artificial Sequence
  Description of Artificial Sequence: Synthetic oligonucleotide
cucuugcauguuacaugguuacc

SEQ ID NO: 1307 - RNA, 23 nt, Artificial Sequence
  Description of Artificial Sequence: Synthetic oligonucleotide
ucuugcauguuacaugguuacca

SEQ ID NO: 1308 - RNA, 23 nt, Artificial Sequence
  Description of Artificial Sequence: Synthetic oligonucleotide
ucuugcauguuacaugguuacca

SEQ ID NO: 1309 - RNA, 23 nt, Artificial Sequence
  Description of Artificial Sequence: Synthetic oligonucleotide
ucuugcauguuacaugguuacca

SEQ ID NO: 1310 - RNA, 23 nt, Artificial Sequence
  Description of Artificial Sequence: Synthetic oligonucleotide
cuugcauguuacaugguuaccac

SEQ ID NO: 1311 - RNA, 23 nt, Artificial Sequence
  Description of Artificial Sequence: Synthetic oligonucleotide
uugcauguuacaugguuaccaca

SEQ ID NO: 1312 - RNA, 23 nt, Artificial Sequence
  Description of Artificial Sequence: Synthetic oligonucleotide
uugcauguuacaugguuaccaca

SEQ ID NO: 1313 - RNA, 23 nt, Artificial Sequence
  Description of Artificial Sequence: Synthetic oligonucleotide
ugcauguuacaugguuaccacaa

SEQ ID NO: 1314 - RNA, 23 nt, Artificial Sequence
  Description of Artificial Sequence: Synthetic oligonucleotide
gcauguuacaugguuaccacaag

SEQ ID NO: 1315 - RNA, 23 nt, Artificial Sequence
  Description of Artificial Sequence: Synthetic oligonucleotide
cauguuacaugguuaccacaagc

SEQ ID NO: 1316 - RNA, 23 nt, Artificial Sequence
  Description of Artificial Sequence: Synthetic oligonucleotide
agcuccucuggccagcaucgaau

SEQ ID NO: 1317 - RNA, 23 nt, Artificial Sequence
  Description of Artificial Sequence: Synthetic oligonucleotide
gaauauaaguaagaugcauuuac

SEQ ID NO: 1318 - RNA, 23 nt, Artificial Sequence
  Description of Artificial Sequence: Synthetic oligonucleotide
aauauaaguaagaugcauuuacu

SEQ ID NO: 1319 - RNA, 23 nt, Artificial Sequence
  Description of Artificial Sequence: Synthetic oligonucleotide
auauaaguaagaugcauuuacua

SEQ ID NO: 1320 - RNA, 23 nt, Artificial Sequence
  Description of Artificial Sequence: Synthetic oligonucleotide
uauaaguaagaugcauuuacuac

SEQ ID NO: 1321 - RNA, 23 nt, Artificial Sequence
  Description of Artificial Sequence: Synthetic oligonucleotide
auaaguaagaugcauuuacuaca

SEQ ID NO: 1322 - RNA, 23 nt, Artificial Sequence
  Description of Artificial Sequence: Synthetic oligonucleotide
auaaguaagaugcauuuacuaca

SEQ ID NO: 1323 - RNA, 23 nt, Artificial Sequence
  Description of Artificial Sequence: Synthetic oligonucleotide
auaaguaagaugcauuuacuaca

SEQ ID NO: 1324 - RNA, 23 nt, Artificial Sequence
  Description of Artificial Sequence: Synthetic oligonucleotide
auaaguaagaugcauuuacuaca

SEQ ID NO: 1325 - RNA, 23 nt, Artificial Sequence
  Description of Artificial Sequence: Synthetic oligonucleotide
auaaguaagaugcauuuacuaca

SEQ ID NO: 1326 - RNA, 23 nt, Artificial Sequence
  Description of Artificial Sequence: Synthetic oligonucleotide
auaaguaagaugcauuuacuaca

SEQ ID NO: 1327 - RNA, 23 nt, Artificial Sequence
  Description of Artificial Sequence: Synthetic oligonucleotide
auaaguaagaugcauuuacuaca

SEQ ID NO: 1328 - RNA, 23 nt, Artificial Sequence
  Description of Artificial Sequence: Synthetic oligonucleotide
auaaguaagaugcauuuacuaca

SEQ ID NO: 1329 - RNA, 23 nt, Artificial Sequence
  Description of Artificial Sequence: Synthetic oligonucleotide
auaaguaagaugcauuuacuaca

SEQ ID NO: 1330 - RNA, 23 nt, Artificial Sequence
  Description of Artificial Sequence: Synthetic oligonucleotide
auaaguaagaugcauuuacuaca

SEQ ID NO: 1331 - RNA, 23 nt, Artificial Sequence
  Description of Artificial Sequence: Synthetic oligonucleotide
auaaguaagaugcauuuacuaca

SEQ ID NO: 1332 - RNA, 23 nt, Artificial Sequence
  Description of Artificial Sequence: Synthetic oligonucleotide
auaaguaagaugcauuuacuaca

SEQ ID NO: 1333 - RNA, 23 nt, Artificial Sequence
  Description of Artificial Sequence: Synthetic oligonucleotide
uaaguaagaugcauuuacuacag

SEQ ID NO: 1334 - RNA, 21 nt, Artificial Sequence
  Description of Artificial Sequence: Synthetic oligonucleotide
aaguaagaugcauuuacuaca

SEQ ID NO: 1335 - RNA, 23 nt, Artificial Sequence
  Description of Artificial Sequence: Synthetic oligonucleotide
aguuggcuucuaaugcuucagau

SEQ ID NO: 1336 - RNA, 23 nt, Artificial Sequence
  Description of Artificial Sequence: Synthetic oligonucleotide
ggcuucuaaugcuucagauagaa

SEQ ID NO: 1337 - RNA, 23 nt, Artificial Sequence
  Description of Artificial Sequence: Synthetic oligonucleotide
ggcuucuaaugcuucagauagaa

SEQ ID NO: 1338 - RNA, 23 nt, Artificial Sequence
  Description of Artificial Sequence: Synthetic oligonucleotide
ggcuucuaaugcuucagauagaa

SEQ ID NO: 1339 - RNA, 21 nt, Artificial Sequence
  Description of Artificial Sequence: Synthetic oligonucleotide
cucucagcacagcagagcuua

SEQ ID NO: 1340 - RNA, 21 nt, Artificial Sequence
  Description of Artificial Sequence: Synthetic oligonucleotide
cucucagcacagcagagcuua

SEQ ID NO: 1341 - RNA, 21 nt, Artificial Sequence
  Description of Artificial Sequence: Synthetic oligonucleotide
cucucagcacagcagagcuua

SEQ ID NO: 1342 - RNA, 21 nt, Artificial Sequence
  Description of Artificial Sequence: Synthetic oligonucleotide
ucucagcacagcagagcuuua

SEQ ID NO: 1343 - RNA, 21 nt, Artificial Sequence
  Description of Artificial Sequence: Synthetic oligonucleotide
cagcagagcuuuccagaggaa

SEQ ID NO: 1344 - RNA, 21 nt, Artificial Sequence
  Description of Artificial Sequence: Synthetic oligonucleotide
aaugagguucuucugugcaca

SEQ ID NO: 1345 - RNA, 21 nt, Artificial Sequence
  Description of Artificial Sequence: Synthetic oligonucleotide
aaugagguucuucugugcaca

SEQ ID NO: 1346 - RNA, 21 nt, Artificial Sequence
  Description of Artificial Sequence: Synthetic oligonucleotide
augagguucuucugugcacga

SEQ ID NO: 1347 - RNA, 21 nt, Artificial Sequence
  Description of Artificial Sequence: Synthetic oligonucleotide
ugagguucuucugugcacgua

SEQ ID NO: 1348 - RNA, 21 nt, Artificial Sequence
  Description of Artificial Sequence: Synthetic oligonucleotide
ugagguucuucugugcacgua

SEQ ID NO: 1349 - RNA, 21 nt, Artificial Sequence
  Description of Artificial Sequence: Synthetic oligonucleotide
gagguucuucugugcacguua

SEQ ID NO: 1350 - RNA, 21 nt, Artificial Sequence
  Description of Artificial Sequence: Synthetic oligonucleotide
agguucuucugugcacguuga

SEQ ID NO: 1351 - RNA, 21 nt, Artificial Sequence
  Description of Artificial Sequence: Synthetic oligonucleotide
agguucuucugugcacguuga

SEQ ID NO: 1352 - RNA, 21 nt, Artificial Sequence
  Description of Artificial Sequence: Synthetic oligonucleotide
agguucuucugugcacguuga

SEQ ID NO: 1353 - RNA, 21 nt, Artificial Sequence
  Description of Artificial Sequence: Synthetic oligonucleotide
agguucuucugugcacguuga

SEQ ID NO: 1354 - RNA, 21 nt, Artificial Sequence
  Description of Artificial Sequence: Synthetic oligonucleotide
agguacuucugugcacguuga

SEQ ID NO: 1355 - RNA, 21 nt, Artificial Sequence
  Description of Artificial Sequence: Synthetic oligonucleotide
aggaucuucugugcacguuga

SEQ ID NO: 1356 - RNA, 21 nt, Artificial Sequence
  Description of Artificial Sequence: Synthetic oligonucleotide
agcuucuucugugcacguuga

SEQ ID NO: 1357 - RNA, 21 nt, Artificial Sequence
  Description of Artificial Sequence: Synthetic oligonucleotide
agguucuucugugcacguuga

SEQ ID NO: 1358 - RNA, 21 nt, Artificial Sequence
  Description of Artificial Sequence: Synthetic oligonucleotide
gguucuucugugcacguugca

SEQ ID NO: 1359 - RNA, 21 nt, Artificial Sequence
  Description of Artificial Sequence: Synthetic oligonucleotide
gguucuucugugcacguugca

SEQ ID NO: 1360 - RNA, 19 nt, Artificial Sequence
  Description of Artificial Sequence: Synthetic oligonucleotide
guucuucugugcacguuga

SEQ ID NO: 1361 - RNA, 21 nt, Artificial Sequence
  Description of Artificial Sequence: Synthetic oligonucleotide
guucuucugugcacguugcua

SEQ ID NO: 1362 - RNA, 21 nt, Artificial Sequence
  Description of Artificial Sequence: Synthetic oligonucleotide
uucuucugugcacguugcuga

SEQ ID NO: 1363 - RNA, 21 nt, Artificial Sequence
  Description of Artificial Sequence: Synthetic oligonucleotide
ucuucugugcacguugcugca

SEQ ID NO: 1364 - RNA, 21 nt, Artificial Sequence
  Description of Artificial Sequence: Synthetic oligonucleotide
ucuucugugcacguugcugca

SEQ ID NO: 1365 - RNA, 21 nt, Artificial Sequence
  Description of Artificial Sequence: Synthetic oligonucleotide
cuucugugcacguugcugcaa

SEQ ID NO: 1366 - RNA, 21 nt, Artificial Sequence
  Description of Artificial Sequence: Synthetic oligonucleotide
cuucugugcacguugcugcaa

SEQ ID NO: 1367 - RNA, 21 nt, Artificial Sequence
  Description of Artificial Sequence: Synthetic oligonucleotide
uucugugcacguugcugcaga

SEQ ID NO: 1368 - RNA, 21 nt, Artificial Sequence
  Description of Artificial Sequence: Synthetic oligonucleotide
ucugugcacguugcugcagca

SEQ ID NO: 1369 - RNA, 21 nt, Artificial Sequence
  Description of Artificial Sequence: Synthetic oligonucleotide
cugugcacguugcugcagcua

SEQ ID NO: 1370 - RNA, 21 nt, Artificial Sequence
  Description of Artificial Sequence: Synthetic oligonucleotide
cugugcacguugcugcagcua

SEQ ID NO: 1371 - RNA, 21 nt, Artificial Sequence
  Description of Artificial Sequence: Synthetic oligonucleotide
ugugcacguugcugcagcuua

SEQ ID NO: 1372 - RNA, 21 nt, Artificial Sequence
  Description of Artificial Sequence: Synthetic oligonucleotide
gugcacguugcugcagcuuua

SEQ ID NO: 1373 - RNA, 21 nt, Artificial Sequence
  Description of Artificial Sequence: Synthetic oligonucleotide
gcacguugcugcagcuuugga

SEQ ID NO: 1374 - RNA, 21 nt, Artificial Sequence
  Description of Artificial Sequence: Synthetic oligonucleotide
cacguugcugcagcuuuggga

SEQ ID NO: 1375 - RNA, 21 nt, Artificial Sequence
  Description of Artificial Sequence: Synthetic oligonucleotide
gagaugccagcuguccagcua

SEQ ID NO: 1376 - RNA, 21 nt, Artificial Sequence
  Description of Artificial Sequence: Synthetic oligonucleotide
gaugccagcuguccagcugca

SEQ ID NO: 1377 - RNA, 21 nt, Artificial Sequence
  Description of Artificial Sequence: Synthetic oligonucleotide
cuguccagcugcugcuucuga

SEQ ID NO: 1378 - RNA, 21 nt, Artificial Sequence
  Description of Artificial Sequence: Synthetic oligonucleotide
ccagcugcugcuucuggccua

SEQ ID NO: 1379 - RNA, 21 nt, Artificial Sequence
  Description of Artificial Sequence: Synthetic oligonucleotide
cuggccugccuggugugggaa

SEQ ID NO: 1380 - RNA, 21 nt, Artificial Sequence
  Description of Artificial Sequence: Synthetic oligonucleotide
cuggccugccuggugugggaa

SEQ ID NO: 1381 - RNA, 21 nt, Artificial Sequence
  Description of Artificial Sequence: Synthetic oligonucleotide
cuggccugccuggugugggaa

SEQ ID NO: 1382 - RNA, 21 nt, Artificial Sequence
  Description of Artificial Sequence: Synthetic oligonucleotide
uggccugccuggugugggaua

SEQ ID NO: 1383 - RNA, 21 nt, Artificial Sequence
  Description of Artificial Sequence: Synthetic oligonucleotide
gccugccuggugugugaugua

SEQ ID NO: 1384 - RNA, 21 nt, Artificial Sequence
  Description of Artificial Sequence: Synthetic oligonucleotide
gccugccuggugugggaugua

SEQ ID NO: 1385 - RNA, 21 nt, Artificial Sequence
  Description of Artificial Sequence: Synthetic oligonucleotide
agaguggccgaugccaguaua

SEQ ID NO: 1386 - RNA, 21 nt, Artificial Sequence
  Description of Artificial Sequence: Synthetic oligonucleotide
aguguggccagucccaaugaa

SEQ ID NO: 1387 - RNA, 21 nt, Artificial Sequence
  Description of Artificial Sequence: Synthetic oligonucleotide
guguggccagucccaaugaaa

SEQ ID NO: 1388 - RNA, 21 nt, Artificial Sequence
  Description of Artificial Sequence: Synthetic oligonucleotide
guguggccagucccaaugaaa

SEQ ID NO: 1389 - RNA, 21 nt, Artificial Sequence
  Description of Artificial Sequence: Synthetic oligonucleotide
gccaggccaugucagucauca

SEQ ID NO: 1390 - RNA, 21 nt, Artificial Sequence
  Description of Artificial Sequence: Synthetic oligonucleotide
gccaggccaugucagucauca

SEQ ID NO: 1391 - RNA, 21 nt, Artificial Sequence
  Description of Artificial Sequence: Synthetic oligonucleotide
gccaggccaugucagucauca

SEQ ID NO: 1392 - RNA, 21 nt, Artificial Sequence
  Description of Artificial Sequence: Synthetic oligonucleotide
ggccaugucagucauccauaa

SEQ ID NO: 1393 - RNA, 21 nt, Artificial Sequence
  Description of Artificial Sequence: Synthetic oligonucleotide
gaccuggaggccaccaaagca

SEQ ID NO: 1394 - RNA, 21 nt, Artificial Sequence
  Description of Artificial Sequence: Synthetic oligonucleotide
cuggaggccaccaaagcucga

SEQ ID NO: 1395 - RNA, 21 nt, Artificial Sequence
  Description of Artificial Sequence: Synthetic oligonucleotide
gaaacccaaaccagagaguua

SEQ ID NO: 1396 - RNA, 21 nt, Artificial Sequence
  Description of Artificial Sequence: Synthetic oligonucleotide
cagcaaccuccuccgagacaa

SEQ ID NO: 1397 - RNA, 21 nt, Artificial Sequence
  Description of Artificial Sequence: Synthetic oligonucleotide
cagcaaccuccuccgagacaa

SEQ ID NO: 1398 - RNA, 21 nt, Artificial Sequence
  Description of Artificial Sequence: Synthetic oligonucleotide
gcaaccuccuccgagacaaga

SEQ ID NO: 1399 - RNA, 21 nt, Artificial Sequence
  Description of Artificial Sequence: Synthetic oligonucleotide
gcaaccuccuccgagacaaga

SEQ ID NO: 1400 - RNA, 21 nt, Artificial Sequence
  Description of Artificial Sequence: Synthetic oligonucleotide
gcaaccuccuccgagacaaga

SEQ ID NO: 1401 - RNA, 21 nt, Artificial Sequence
  Description of Artificial Sequence: Synthetic oligonucleotide
agacaagucaguucuggagga

SEQ ID NO: 1402 - RNA, 21 nt, Artificial Sequence
  Description of Artificial Sequence: Synthetic oligonucleotide
caagucaguucuggaggaaga

SEQ ID NO: 1403 - RNA, 21 nt, Artificial Sequence
  Description of Artificial Sequence: Synthetic oligonucleotide
gucaguucuggaggaagagaa

SEQ ID NO: 1404 - RNA, 21 nt, Artificial Sequence
  Description of Artificial Sequence: Synthetic oligonucleotide
agaaucuggccaggagguuga

SEQ ID NO: 1405 - RNA, 21 nt, Artificial Sequence
  Description of Artificial Sequence: Synthetic oligonucleotide
uggccaggagguuggaaagca

SEQ ID NO: 1406 - RNA, 21 nt, Artificial Sequence
  Description of Artificial Sequence: Synthetic oligonucleotide
uggccaggagguuggaaagca

SEQ ID NO: 1407 - RNA, 21 nt, Artificial Sequence
  Description of Artificial Sequence: Synthetic oligonucleotide
cagccaggagguagcaaggca

SEQ ID NO: 1408 - RNA, 21 nt, Artificial Sequence
  Description of Artificial Sequence: Synthetic oligonucleotide
ugccaccaggcuccagagaaa

SEQ ID NO: 1409 - RNA, 21 nt, Artificial Sequence
  Description of Artificial Sequence: Synthetic oligonucleotide
aauuuggacacuuuggccuua

SEQ ID NO: 1410 - RNA, 21 nt, Artificial Sequence
  Description of Artificial Sequence: Synthetic oligonucleotide
aauuuggacacuuuggccuua

SEQ ID NO: 1411 - RNA, 21 nt, Artificial Sequence
  Description of Artificial Sequence: Synthetic oligonucleotide
acacuuuggccuuccaggaaa

SEQ ID NO: 1412 - RNA, 21 nt, Artificial Sequence
  Description of Artificial Sequence: Synthetic oligonucleotide
cuuuggccuuccaggaacuga

SEQ ID NO: 1413 - RNA, 21 nt, Artificial Sequence
  Description of Artificial Sequence: Synthetic oligonucleotide
aggaacugaaguccgagcuaa

SEQ ID NO: 1414 - RNA, 21 nt, Artificial Sequence
  Description of Artificial Sequence: Synthetic oligonucleotide
aggaacugaaguccgagcuaa

SEQ ID NO: 1415 - RNA, 21 nt, Artificial Sequence
  Description of Artificial Sequence: Synthetic oligonucleotide
gaaguccgagcuaacugaaga

SEQ ID NO: 1416 - RNA, 21 nt, Artificial Sequence
  Description of Artificial Sequence: Synthetic oligonucleotide
gcuaacugaaguuccugcuua

SEQ ID NO: 1417 - RNA, 21 nt, Artificial Sequence
  Description of Artificial Sequence: Synthetic oligonucleotide
cuaacugaaguuccugcuuca

SEQ ID NO: 1418 - RNA, 21 nt, Artificial Sequence
  Description of Artificial Sequence: Synthetic oligonucleotide
gaaguuccugcuucccgaaua

SEQ ID NO: 1419 - RNA, 21 nt, Artificial Sequence
  Description of Artificial Sequence: Synthetic oligonucleotide
gagaacuaguuuggguaggaa

SEQ ID NO: 1420 - RNA, 21 nt, Artificial Sequence
  Description of Artificial Sequence: Synthetic oligonucleotide
gagaacuaguuuggguaggaa

SEQ ID NO: 1421 - RNA, 21 nt, Artificial Sequence
  Description of Artificial Sequence: Synthetic oligonucleotide
acuaguuuggguaggagagca

SEQ ID NO: 1422 - RNA, 21 nt, Artificial Sequence
  Description of Artificial Sequence: Synthetic oligonucleotide
acuaguuuggguaggagagca

SEQ ID NO: 1423 - RNA, 21 nt, Artificial Sequence
  Description of Artificial Sequence: Synthetic oligonucleotide
ggguaggagagccucucacga

SEQ ID NO: 1424 - RNA, 21 nt, Artificial Sequence
  Description of Artificial Sequence: Synthetic oligonucleotide
guaggagagccucucacgcua

SEQ ID NO: 1425 - RNA, 21 nt, Artificial Sequence
  Description of Artificial Sequence: Synthetic oligonucleotide
guaggagagccucucacgcua

SEQ ID NO: 1426 - RNA, 21 nt, Artificial Sequence
  Description of Artificial Sequence: Synthetic oligonucleotide
uaggagagccucucacgcuga

SEQ ID NO: 1427 - RNA, 21 nt, Artificial Sequence
  Description of Artificial Sequence: Synthetic oligonucleotide
aggagagccucucacgcugaa

SEQ ID NO: 1428 - RNA, 21 nt, Artificial Sequence
  Description of Artificial Sequence: Synthetic oligonucleotide
gccucucacgcugagaacaga

SEQ ID NO: 1429 - RNA, 21 nt, Artificial Sequence
  Description of Artificial Sequence: Synthetic oligonucleotide
gccucucacgcugagaacaga

SEQ ID NO: 1430 - RNA, 21 nt, Artificial Sequence
  Description of Artificial Sequence: Synthetic oligonucleotide
gccucucacgcugagaacaga

SEQ ID NO: 1431 - RNA, 21 nt, Artificial Sequence
  Description of Artificial Sequence: Synthetic oligonucleotide
cacgcugagaacagcagaaaa

SEQ ID NO: 1432 - RNA, 21 nt, Artificial Sequence
  Description of Artificial Sequence: Synthetic oligonucleotide
acgcugagaacagcagaaaca

SEQ ID NO: 1433 - RNA, 21 nt, Artificial Sequence
  Description of Artificial Sequence: Synthetic oligonucleotide
cgcugagaacagcagaaacaa

SEQ ID NO: 1434 - RNA, 21 nt, Artificial Sequence
  Description of Artificial Sequence: Synthetic oligonucleotide
cgcugagaacagcagaaacaa

SEQ ID NO: 1435 - RNA, 21 nt, Artificial Sequence
  Description of Artificial Sequence: Synthetic oligonucleotide
gcugagaacagcagaaacaaa

SEQ ID NO: 1436 - RNA, 21 nt, Artificial Sequence
  Description of Artificial Sequence: Synthetic oligonucleotide
cugagaacagcagaaacaaua

SEQ ID NO: 1437 - RNA, 21 nt, Artificial Sequence
  Description of Artificial Sequence: Synthetic oligonucleotide
ugagaacagcagaaacaauua

SEQ ID NO: 1438 - RNA, 21 nt, Artificial Sequence
  Description of Artificial Sequence: Synthetic oligonucleotide
gagaacagcagaaacaauuaa

SEQ ID NO: 1439 - RNA, 21 nt, Artificial Sequence
  Description of Artificial Sequence: Synthetic oligonucleotide
agaacagcagaaacaauuaca

SEQ ID NO: 1440 - RNA, 21 nt, Artificial Sequence
  Description of Artificial Sequence: Synthetic oligonucleotide
agaacagcagaaacaauuaca

SEQ ID NO: 1441 - RNA, 21 nt, Artificial Sequence
  Description of Artificial Sequence: Synthetic oligonucleotide
gaacagcagaaacaauuacua

SEQ ID NO: 1442 - RNA, 21 nt, Artificial Sequence
  Description of Artificial Sequence: Synthetic oligonucleotide
aacagcagaaacaauuacuga

SEQ ID NO: 1443 - RNA, 21 nt, Artificial Sequence
  Description of Artificial Sequence: Synthetic oligonucleotide
aacagcagaaacaauuacuga

SEQ ID NO: 1444 - RNA, 21 nt, Artificial Sequence
  Description of Artificial Sequence: Synthetic oligonucleotide
aacaccagaaacaauuacuga

SEQ ID NO: 1445 - RNA, 21 nt, Artificial Sequence
  Description of Artificial Sequence: Synthetic oligonucleotide
aacugcagaaacaauuacuga

SEQ ID NO: 1446 - RNA, 21 nt, Artificial Sequence
  Description of Artificial Sequence: Synthetic oligonucleotide
aagagcagaaacaauuacuga

SEQ ID NO: 1447 - RNA, 21 nt, Artificial Sequence
  Description of Artificial Sequence: Synthetic oligonucleotide
aacagcagaaacaauuacuga

SEQ ID NO: 1448 - RNA, 21 nt, Artificial Sequence
  Description of Artificial Sequence: Synthetic oligonucleotide
aacagcagaaacaauuacuga

SEQ ID NO: 1449 - RNA, 21 nt, Artificial Sequence
  Description of Artificial Sequence: Synthetic oligonucleotide
aacagcagaaacaauuacuga

SEQ ID NO: 1450 - RNA, 21 nt, Artificial Sequence
  Description of Artificial Sequence: Synthetic oligonucleotide
acagcagaaacaauuacugga

SEQ ID NO: 1451 - RNA, 19 nt, Artificial Sequence
  Description of Artificial Sequence: Synthetic oligonucleotide
cagcagaaacaauuacuga

SEQ ID NO: 1452 - RNA, 21 nt, Artificial Sequence
  Description of Artificial Sequence: Synthetic oligonucleotide
cagcagaaacaauuacuggca

SEQ ID NO: 1453 - RNA, 21 nt, Artificial Sequence
  Description of Artificial Sequence: Synthetic oligonucleotide
agcagaaacaauuacuggcaa

SEQ ID NO: 1454 - RNA, 21 nt, Artificial Sequence
  Description of Artificial Sequence: Synthetic oligonucleotide
gcagaaacaauuacuggcaaa

SEQ ID NO: 1455 - RNA, 21 nt, Artificial Sequence
  Description of Artificial Sequence: Synthetic oligonucleotide
cagaaacaauuacuggcaaga

SEQ ID NO: 1456 - RNA, 21 nt, Artificial Sequence
  Description of Artificial Sequence: Synthetic oligonucleotide
cagaaacaauuacuggcaaga

SEQ ID NO: 1457 - RNA, 21 nt, Artificial Sequence
  Description of Artificial Sequence: Synthetic oligonucleotide
agaaacaauuacugucaagua

SEQ ID NO: 1458 - RNA, 21 nt, Artificial Sequence
  Description of Artificial Sequence: Synthetic oligonucleotide
gaaacaauuacuggcaaguaa

SEQ ID NO: 1459 - RNA, 21 nt, Artificial Sequence
  Description of Artificial Sequence: Synthetic oligonucleotide
aaacaauuacuggcaaguaua

SEQ ID NO: 1460 - RNA, 21 nt, Artificial Sequence
  Description of Artificial Sequence: Synthetic oligonucleotide
aacaauuacuggcaaguauga

SEQ ID NO: 1461 - RNA, 21 nt, Artificial Sequence
  Description of Artificial Sequence: Synthetic oligonucleotide
aacaauuacuggcaaguauga

SEQ ID NO: 1462 - RNA, 21 nt, Artificial Sequence
  Description of Artificial Sequence: Synthetic oligonucleotide
ggcaaguaugguguguggaua

SEQ ID NO: 1463 - RNA, 21 nt, Artificial Sequence
  Description of Artificial Sequence: Synthetic oligonucleotide
ggcaaguaugguguguggaua

SEQ ID NO: 1464 - RNA, 21 nt, Artificial Sequence
  Description of Artificial Sequence: Synthetic oligonucleotide
ggcaaguaugguguguggaua

SEQ ID NO: 1465 - RNA, 21 nt, Artificial Sequence
  Description of Artificial Sequence: Synthetic oligonucleotide
caaguaugguguguggaugca

SEQ ID NO: 1466 - RNA, 21 nt, Artificial Sequence
  Description of Artificial Sequence: Synthetic oligonucleotide
caaguaugguguguggaugca

SEQ ID NO: 1467 - RNA, 21 nt, Artificial Sequence
  Description of Artificial Sequence: Synthetic oligonucleotide
ugaguaugaccucaucagcca

SEQ ID NO: 1468 - RNA, 21 nt, Artificial Sequence
  Description of Artificial Sequence: Synthetic oligonucleotide
gaguaugaccucaucagccaa

SEQ ID NO: 1469 - RNA, 21 nt, Artificial Sequence
  Description of Artificial Sequence: Synthetic oligonucleotide
aguaugaccucaucagccaga

SEQ ID NO: 1470 - RNA, 21 nt, Artificial Sequence
  Description of Artificial Sequence: Synthetic oligonucleotide
guaugaccucaucagccagua

SEQ ID NO: 1471 - RNA, 21 nt, Artificial Sequence
  Description of Artificial Sequence: Synthetic oligonucleotide
guaugaccucaucagccagua

SEQ ID NO: 1472 - RNA, 21 nt, Artificial Sequence
  Description of Artificial Sequence: Synthetic oligonucleotide
uaugaccucaucagccaguua

SEQ ID NO: 1473 - RNA, 21 nt, Artificial Sequence
  Description of Artificial Sequence: Synthetic oligonucleotide
augaccucaucagccaguuua

SEQ ID NO: 1474 - RNA, 21 nt, Artificial Sequence
  Description of Artificial Sequence: Synthetic oligonucleotide
ugaccucaucagccaguuuaa

SEQ ID NO: 1475 - RNA, 21 nt, Artificial Sequence
  Description of Artificial Sequence: Synthetic oligonucleotide
gaccucaucagccaguuuaua

SEQ ID NO: 1476 - RNA, 21 nt, Artificial Sequence
  Description of Artificial Sequence: Synthetic oligonucleotide
accucaucagccaguuuauga

SEQ ID NO: 1477 - RNA, 21 nt, Artificial Sequence
  Description of Artificial Sequence: Synthetic oligonucleotide
ccucaucagccaguuuaugca

SEQ ID NO: 1478 - RNA, 21 nt, Artificial Sequence
  Description of Artificial Sequence: Synthetic oligonucleotide
ccucaucagccaguuuaugca

SEQ ID NO: 1479 - RNA, 21 nt, Artificial Sequence
  Description of Artificial Sequence: Synthetic oligonucleotide
ccucaucagccaguuuaugca

SEQ ID NO: 1480 - RNA, 21 nt, Artificial Sequence
  Description of Artificial Sequence: Synthetic oligonucleotide
ccucaucagccaguuuaugca

SEQ ID NO: 1481 - RNA, 21 nt, Artificial Sequence
  Description of Artificial Sequence: Synthetic oligonucleotide
ccucaucagccaguuuaugca

SEQ ID NO: 1482 - RNA, 21 nt, Artificial Sequence
  Description of Artificial Sequence: Synthetic oligonucleotide
ccucaucagccaguuuaugca

SEQ ID NO: 1483 - RNA, 21 nt, Artificial Sequence
  Description of Artificial Sequence: Synthetic oligonucleotide
ccucaucagccaguuuaugca

SEQ ID NO: 1484 - RNA, 21 nt, Artificial Sequence
  Description of Artificial Sequence: Synthetic oligonucleotide
ccucuucagccaguuuaugca

SEQ ID NO: 1485 - RNA, 21 nt, Artificial Sequence
  Description of Artificial Sequence: Synthetic oligonucleotide
ccugaucagccaguuuaugca

SEQ ID NO: 1486 - RNA, 21 nt, Artificial Sequence
  Description of Artificial Sequence: Synthetic oligonucleotide
ccacaucagccaguuuaugca

SEQ ID NO: 1487 - RNA, 21 nt, Artificial Sequence
  Description of Artificial Sequence: Synthetic oligonucleotide
ccucaucagccaguuuaugca

SEQ ID NO: 1488 - RNA, 21 nt, Artificial Sequence
  Description of Artificial Sequence: Synthetic oligonucleotide
cucaucagccaguuuaugcaa

SEQ ID NO: 1489 - RNA, 19 nt, Artificial Sequence
  Description of Artificial Sequence: Synthetic oligonucleotide
ucaucagccaguuuaugca

SEQ ID NO: 1490 - RNA, 21 nt, Artificial Sequence
  Description of Artificial Sequence: Synthetic oligonucleotide
ucaucagccaguuuaugcaga

SEQ ID NO: 1491 - RNA, 21 nt, Artificial Sequence
  Description of Artificial Sequence: Synthetic oligonucleotide
ucaucagccaguuuaugcaga

SEQ ID NO: 1492 - RNA, 21 nt, Artificial Sequence
  Description of Artificial Sequence: Synthetic oligonucleotide
caucagccaguuuaugcagga

SEQ ID NO: 1493 - RNA, 21 nt, Artificial Sequence
  Description of Artificial Sequence: Synthetic oligonucleotide
aucagccaguuuaugcaggga

SEQ ID NO: 1494 - RNA, 21 nt, Artificial Sequence
  Description of Artificial Sequence: Synthetic oligonucleotide
aucagccaguuuaugcaggga

SEQ ID NO: 1495 - RNA, 21 nt, Artificial Sequence
  Description of Artificial Sequence: Synthetic oligonucleotide
ucagccaguuuaugcagggca

SEQ ID NO: 1496 - RNA, 21 nt, Artificial Sequence
  Description of Artificial Sequence: Synthetic oligonucleotide
cagccaguuuaugcagggcua

SEQ ID NO: 1497 - RNA, 21 nt, Artificial Sequence
  Description of Artificial Sequence: Synthetic oligonucleotide
agccaguuuaugcagggcuaa

SEQ ID NO: 1498 - RNA, 21 nt, Artificial Sequence
  Description of Artificial Sequence: Synthetic oligonucleotide
agccaguuuaugcagggcuaa

SEQ ID NO: 1499 - RNA, 21 nt, Artificial Sequence
  Description of Artificial Sequence: Synthetic oligonucleotide
gccaguuuaugcagggcuaca

SEQ ID NO: 1500 - RNA, 21 nt, Artificial Sequence
  Description of Artificial Sequence: Synthetic oligonucleotide
gccaguuuaugcagugcuaca

SEQ ID NO: 1501 - RNA, 21 nt, Artificial Sequence
  Description of Artificial Sequence: Synthetic oligonucleotide
ccaguuuaugcagggcuacca

SEQ ID NO: 1502 - RNA, 21 nt, Artificial Sequence
  Description of Artificial Sequence: Synthetic oligonucleotide
ccaguuuaugcaggucuacca

SEQ ID NO: 1503 - RNA, 21 nt, Artificial Sequence
  Description of Artificial Sequence: Synthetic oligonucleotide
ugcagggcuacccuucuaaga

SEQ ID NO: 1504 - RNA, 21 nt, Artificial Sequence
  Description of Artificial Sequence: Synthetic oligonucleotide
gggugcugugguguacucgga

SEQ ID NO: 1505 - RNA, 21 nt, Artificial Sequence
  Description of Artificial Sequence: Synthetic oligonucleotide
gggugcugugguguacucgga

SEQ ID NO: 1506 - RNA, 21 nt, Artificial Sequence
  Description of Artificial Sequence: Synthetic oligonucleotide
gagccucuauuuccagggcga

SEQ ID NO: 1507 - RNA, 21 nt, Artificial Sequence
  Description of Artificial Sequence: Synthetic oligonucleotide
gagccucuauuuccagggcga

SEQ ID NO: 1508 - RNA, 21 nt, Artificial Sequence
  Description of Artificial Sequence: Synthetic oligonucleotide
ccucuauuuccagggcgcuga

SEQ ID NO: 1509 - RNA, 21 nt, Artificial Sequence
  Description of Artificial Sequence: Synthetic oligonucleotide
uuccagggcgcugaguccaga

SEQ ID NO: 1510 - RNA, 21 nt, Artificial Sequence
  Description of Artificial Sequence: Synthetic oligonucleotide
uuccagggcgcugaguccaga

SEQ ID NO: 1511 - RNA, 21 nt, Artificial Sequence
  Description of Artificial Sequence: Synthetic oligonucleotide
uuccagggcgcugaguccaga

SEQ ID NO: 1512 - RNA, 21 nt, Artificial Sequence
  Description of Artificial Sequence: Synthetic oligonucleotide
agggcgcugaguccagaacua

SEQ ID NO: 1513 - RNA, 21 nt, Artificial Sequence
  Description of Artificial Sequence: Synthetic oligonucleotide
gggcgcugaguccagaacuga

SEQ ID NO: 1514 - RNA, 21 nt, Artificial Sequence
  Description of Artificial Sequence: Synthetic oligonucleotide
gggcgcugaguccagaacuga

SEQ ID NO: 1515 - RNA, 21 nt, Artificial Sequence
  Description of Artificial Sequence: Synthetic oligonucleotide
gggcgcugaguccagaacuga

SEQ ID NO: 1516 - RNA, 21 nt, Artificial Sequence
  Description of Artificial Sequence: Synthetic oligonucleotide
ggcgcugaguccagaacugua

SEQ ID NO: 1517 - RNA, 21 nt, Artificial Sequence
  Description of Artificial Sequence: Synthetic oligonucleotide
gcgcugaguccagaacuguca

SEQ ID NO: 1518 - RNA, 21 nt, Artificial Sequence
  Description of Artificial Sequence: Synthetic oligonucleotide
cgcugaguccagaacugucaa

SEQ ID NO: 1519 - RNA, 21 nt, Artificial Sequence
  Description of Artificial Sequence: Synthetic oligonucleotide
gcugaguccagaacugucaua

SEQ ID NO: 1520 - RNA, 21 nt, Artificial Sequence
  Description of Artificial Sequence: Synthetic oligonucleotide
cugaguccagaacugucauaa

SEQ ID NO: 1521 - RNA, 21 nt, Artificial Sequence
  Description of Artificial Sequence: Synthetic oligonucleotide
cugaguccagaacugucauaa

SEQ ID NO: 1522 - RNA, 21 nt, Artificial Sequence
  Description of Artificial Sequence: Synthetic oligonucleotide
cugaguccagaacugucauaa

SEQ ID NO: 1523 - RNA, 21 nt, Artificial Sequence
  Description of Artificial Sequence: Synthetic oligonucleotide
ugaguccagaacugucauaaa

SEQ ID NO: 1524 - RNA, 21 nt, Artificial Sequence
  Description of Artificial Sequence: Synthetic oligonucleotide
gaguccagaacugucauaaga

SEQ ID NO: 1525 - RNA, 21 nt, Artificial Sequence
  Description of Artificial Sequence: Synthetic oligonucleotide
gaguccagaacugucauaaga

SEQ ID NO: 1526 - RNA, 21 nt, Artificial Sequence
  Description of Artificial Sequence: Synthetic oligonucleotide
aguccagaacugucauaagaa

SEQ ID NO: 1527 - RNA, 21 nt, Artificial Sequence
  Description of Artificial Sequence: Synthetic oligonucleotide
aguccagaacugucauaagaa

SEQ ID NO: 1528 - RNA, 21 nt, Artificial Sequence
  Description of Artificial Sequence: Synthetic oligonucleotide
guccagaacugucauaagaua

SEQ ID NO: 1529 - RNA, 21 nt, Artificial Sequence
  Description of Artificial Sequence: Synthetic oligonucleotide
guccagaacugucauaagaua

SEQ ID NO: 1530 - RNA, 21 nt, Artificial Sequence
  Description of Artificial Sequence: Synthetic oligonucleotide
guccagaacugucauaagaua

SEQ ID NO: 1531 - RNA, 21 nt, Artificial Sequence
  Description of Artificial Sequence: Synthetic oligonucleotide
guccagaacugucauaagaua

SEQ ID NO: 1532 - RNA, 21 nt, Artificial Sequence
  Description of Artificial Sequence: Synthetic oligonucleotide
guccagaacugucauaagaua

SEQ ID NO: 1533 - RNA, 21 nt, Artificial Sequence
  Description of Artificial Sequence: Synthetic oligonucleotide
guccugaacugucauaagaua

SEQ ID NO: 1534 - RNA, 21 nt, Artificial Sequence
  Description of Artificial Sequence: Synthetic oligonucleotide
gucgagaacugucauaagaua

SEQ ID NO: 1535 - RNA, 21 nt, Artificial Sequence
  Description of Artificial Sequence: Synthetic oligonucleotide
gugcagaacugucauaagaua

SEQ ID NO: 1536 - RNA, 21 nt, Artificial Sequence
  Description of Artificial Sequence: Synthetic oligonucleotide
guccagaacugucauaagaua

SEQ ID NO: 1537 - RNA, 21 nt, Artificial Sequence
  Description of Artificial Sequence: Synthetic oligonucleotide
guccagaacugucauaagaua

SEQ ID NO: 1538 - RNA, 21 nt, Artificial Sequence
  Description of Artificial Sequence: Synthetic oligonucleotide
uccagaacugucauaagauaa

SEQ ID NO: 1539 - RNA, 19 nt, Artificial Sequence
  Description of Artificial Sequence: Synthetic oligonucleotide
ccagaacugucauaagaua

SEQ ID NO: 1540 - RNA, 21 nt, Artificial Sequence
  Description of Artificial Sequence: Synthetic oligonucleotide
ccagaacugucauaagauaua

SEQ ID NO: 1541 - RNA, 21 nt, Artificial Sequence
  Description of Artificial Sequence: Synthetic oligonucleotide
cagaacugucauaagauauga

SEQ ID NO: 1542 - RNA, 21 nt, Artificial Sequence
  Description of Artificial Sequence: Synthetic oligonucleotide
cagaacugucauaagauauga

SEQ ID NO: 1543 - RNA, 21 nt, Artificial Sequence
  Description of Artificial Sequence: Synthetic oligonucleotide
cagaacugucauaagauauga

SEQ ID NO: 1544 - RNA, 21 nt, Artificial Sequence
  Description of Artificial Sequence: Synthetic oligonucleotide
agaacugucauaagauaugaa

SEQ ID NO: 1545 - RNA, 21 nt, Artificial Sequence
  Description of Artificial Sequence: Synthetic oligonucleotide
agaacugucauaagauaugaa

SEQ ID NO: 1546 - RNA, 21 nt, Artificial Sequence
  Description of Artificial Sequence: Synthetic oligonucleotide
gaacugucauaagauaugaga

SEQ ID NO: 1547 - RNA, 21 nt, Artificial Sequence
  Description of Artificial Sequence: Synthetic oligonucleotide
aacugucauaagauaugagca

SEQ ID NO: 1548 - RNA, 21 nt, Artificial Sequence
  Description of Artificial Sequence: Synthetic oligonucleotide
acugucauaagauaugagcua

SEQ ID NO: 1549 - RNA, 21 nt, Artificial Sequence
  Description of Artificial Sequence: Synthetic oligonucleotide
cugucauaagauaugagcuga

SEQ ID NO: 1550 - RNA, 21 nt, Artificial Sequence
  Description of Artificial Sequence: Synthetic oligonucleotide
cugucauaagauaugagcuga

SEQ ID NO: 1551 - RNA, 21 nt, Artificial Sequence
  Description of Artificial Sequence: Synthetic oligonucleotide
cugucauaagauaugagcuga

SEQ ID NO: 1552 - RNA, 21 nt, Artificial Sequence
  Description of Artificial Sequence: Synthetic oligonucleotide
ugucauaagauaugagcugaa

SEQ ID NO: 1553 - RNA, 21 nt, Artificial Sequence
  Description of Artificial Sequence: Synthetic oligonucleotide
cauaagauaugagcugaauaa

SEQ ID NO: 1554 - RNA, 21 nt, Artificial Sequence
  Description of Artificial Sequence: Synthetic oligonucleotide
cugaauaccgagacagugaaa

SEQ ID NO: 1555 - RNA, 21 nt, Artificial Sequence
  Description of Artificial Sequence: Synthetic oligonucleotide
uaccgagacagugaaggcuga

SEQ ID NO: 1556 - RNA, 21 nt, Artificial Sequence
  Description of Artificial Sequence: Synthetic oligonucleotide
uaccgagacagugaaggcuga

SEQ ID NO: 1557 - RNA, 21 nt, Artificial Sequence
  Description of Artificial Sequence: Synthetic oligonucleotide
acagugaaggcugagaaggaa

SEQ ID NO: 1558 - RNA, 21 nt, Artificial Sequence
  Description of Artificial Sequence: Synthetic oligonucleotide
acagugaaggcugagaaggaa

SEQ ID NO: 1559 - RNA, 21 nt, Artificial Sequence
  Description of Artificial Sequence: Synthetic oligonucleotide
acagugaaggcugagaaggaa

SEQ ID NO: 1560 - RNA, 21 nt, Artificial Sequence
  Description of Artificial Sequence: Synthetic oligonucleotide
ugagaaggaaaucccuggaga

SEQ ID NO: 1561 - RNA, 21 nt, Artificial Sequence
  Description of Artificial Sequence: Synthetic oligonucleotide
gccaaaggugccauuguccua

SEQ ID NO: 1562 - RNA, 21 nt, Artificial Sequence
  Description of Artificial Sequence: Synthetic oligonucleotide
ccaaacugaacccagagaaua

SEQ ID NO: 1563 - RNA, 21 nt, Artificial Sequence
  Description of Artificial Sequence: Synthetic oligonucleotide
ccaaacugaacccagagaaua

SEQ ID NO: 1564 - RNA, 21 nt, Artificial Sequence
  Description of Artificial Sequence: Synthetic oligonucleotide
ccaaacugaacccagagaaua

SEQ ID NO: 1565 - RNA, 21 nt, Artificial Sequence
  Description of Artificial Sequence: Synthetic oligonucleotide
caaacugaacccagagaauca

SEQ ID NO: 1566 - RNA, 21 nt, Artificial Sequence
  Description of Artificial Sequence: Synthetic oligonucleotide
uccguaagcagucagucgcca

SEQ ID NO: 1567 - RNA, 21 nt, Artificial Sequence
  Description of Artificial Sequence: Synthetic oligonucleotide
uccguaagcagucagucgcca

SEQ ID NO: 1568 - RNA, 21 nt, Artificial Sequence
  Description of Artificial Sequence: Synthetic oligonucleotide
uccguaagcagucagucgcca

SEQ ID NO: 1569 - RNA, 21 nt, Artificial Sequence
  Description of Artificial Sequence: Synthetic oligonucleotide
uccguaagcagucagucgcca

SEQ ID NO: 1570 - RNA, 21 nt, Artificial Sequence
  Description of Artificial Sequence: Synthetic oligonucleotide
uaagcagucagucgccaauga

SEQ ID NO: 1571 - RNA, 21 nt, Artificial Sequence
  Description of Artificial Sequence: Synthetic oligonucleotide
cagucagucgccaaugccuua

SEQ ID NO: 1572 - RNA, 21 nt, Artificial Sequence
  Description of Artificial Sequence: Synthetic oligonucleotide
ucagucgccaaugccuucaua

SEQ ID NO: 1573 - RNA, 21 nt, Artificial Sequence
  Description of Artificial Sequence: Synthetic oligonucleotide
agucgccaaugccuucaucaa

SEQ ID NO: 1574 - RNA, 21 nt, Artificial Sequence
  Description of Artificial Sequence: Synthetic oligonucleotide
gccaaugccuucaucaucuga

SEQ ID NO: 1575 - RNA, 21 nt, Artificial Sequence
  Description of Artificial Sequence: Synthetic oligonucleotide
ccuucaucaucuguggcacca

SEQ ID NO: 1576 - RNA, 21 nt, Artificial Sequence
  Description of Artificial Sequence: Synthetic oligonucleotide
ccuucaucaucuguggcacca

SEQ ID NO: 1577 - RNA, 21 nt, Artificial Sequence
  Description of Artificial Sequence: Synthetic oligonucleotide
cuguggcaccuuguacaccga

SEQ ID NO: 1578 - RNA, 21 nt, Artificial Sequence
  Description of Artificial Sequence: Synthetic oligonucleotide
cuaccgucaacuuugcuuaua

SEQ ID NO: 1579 - RNA, 21 nt, Artificial Sequence
  Description of Artificial Sequence: Synthetic oligonucleotide
cuaccgucaacuuugcuuaua

SEQ ID NO: 1580 - RNA, 21 nt, Artificial Sequence
  Description of Artificial Sequence: Synthetic oligonucleotide
uaccgucaacuuugcuuauga

SEQ ID NO: 1581 - RNA, 21 nt, Artificial Sequence
  Description of Artificial Sequence: Synthetic oligonucleotide
uaccgucaacuuugcuuauga

SEQ ID NO: 1582 - RNA, 21 nt, Artificial Sequence
  Description of Artificial Sequence: Synthetic oligonucleotide
uaccgucaacuuugcuuauga

SEQ ID NO: 1583 - RNA, 21 nt, Artificial Sequence
  Description of Artificial Sequence: Synthetic oligonucleotide
uaccgucaacuuugcuuauga

SEQ ID NO: 1584 - RNA, 21 nt, Artificial Sequence
  Description of Artificial Sequence: Synthetic oligonucleotide
uaccgucaacuuugcuuauga

SEQ ID NO: 1585 - RNA, 21 nt, Artificial Sequence
  Description of Artificial Sequence: Synthetic oligonucleotide
uacccucaacuuugcuuauga

SEQ ID NO: 1586 - RNA, 21 nt, Artificial Sequence
  Description of Artificial Sequence: Synthetic oligonucleotide
uacggucaacuuugcuuauga

SEQ ID NO: 1587 - RNA, 21 nt, Artificial Sequence
  Description of Artificial Sequence: Synthetic oligonucleotide
uagcgucaacuuugcuuauga

SEQ ID NO: 1588 - RNA, 21 nt, Artificial Sequence
  Description of Artificial Sequence: Synthetic oligonucleotide
uaccgucaacuuugcuuauga

SEQ ID NO: 1589 - RNA, 21 nt, Artificial Sequence
  Description of Artificial Sequence: Synthetic oligonucleotide
uaccgucaacuuugcuuauga

SEQ ID NO: 1590 - RNA, 21 nt, Artificial Sequence
  Description of Artificial Sequence: Synthetic oligonucleotide
accgucaacuuugcuuaugaa

SEQ ID NO: 1591 - RNA, 21 nt, Artificial Sequence
  Description of Artificial Sequence: Synthetic oligonucleotide
accgucaacuuugcuuaugaa

SEQ ID NO: 1592 - RNA, 19 nt, Artificial Sequence
  Description of Artificial Sequence: Synthetic oligonucleotide
ccgucaacuuugcuuauga

SEQ ID NO: 1593 - RNA, 21 nt, Artificial Sequence
  Description of Artificial Sequence: Synthetic oligonucleotide
ccgucaacuuugcuuaugaca

SEQ ID NO: 1594 - RNA, 21 nt, Artificial Sequence
  Description of Artificial Sequence: Synthetic oligonucleotide
cgucaacuuugcuuaugacaa

SEQ ID NO: 1595 - RNA, 21 nt, Artificial Sequence
  Description of Artificial Sequence: Synthetic oligonucleotide
gucaacuuugcuuaugacaca

SEQ ID NO: 1596 - RNA, 21 nt, Artificial Sequence
  Description of Artificial Sequence: Synthetic oligonucleotide
ucaacuuugcuuaugacacaa

SEQ ID NO: 1597 - RNA, 21 nt, Artificial Sequence
  Description of Artificial Sequence: Synthetic oligonucleotide
ucaacuuugcuuaugacacaa

SEQ ID NO: 1598 - RNA, 21 nt, Artificial Sequence
  Description of Artificial Sequence: Synthetic oligonucleotide
caacuuugcuuaugacacaga

SEQ ID NO: 1599 - RNA, 21 nt, Artificial Sequence
  Description of Artificial Sequence: Synthetic oligonucleotide
aacuuugcuuaugacacagga

SEQ ID NO: 1600 - RNA, 21 nt, Artificial Sequence
  Description of Artificial Sequence: Synthetic oligonucleotide
acuuugcuuaugacacaggca

SEQ ID NO: 1601 - RNA, 21 nt, Artificial Sequence
  Description of Artificial Sequence: Synthetic oligonucleotide
cuuugcuuaugacacaggcaa

SEQ ID NO: 1602 - RNA, 21 nt, Artificial Sequence
  Description of Artificial Sequence: Synthetic oligonucleotide
acaggcacagguaucagcaaa

SEQ ID NO: 1603 - RNA, 21 nt, Artificial Sequence
  Description of Artificial Sequence: Synthetic oligonucleotide
auaaguacagcagcaugauua

SEQ ID NO: 1604 - RNA, 21 nt, Artificial Sequence
  Description of Artificial Sequence: Synthetic oligonucleotide
uaaguacagcagcaugauuga

SEQ ID NO: 1605 - RNA, 21 nt, Artificial Sequence
  Description of Artificial Sequence: Synthetic oligonucleotide
aaguacagcagcaugauugaa

SEQ ID NO: 1606 - RNA, 21 nt, Artificial Sequence
  Description of Artificial Sequence: Synthetic oligonucleotide
aaguacagcagcaugauugaa

SEQ ID NO: 1607 - RNA, 21 nt, Artificial Sequence
  Description of Artificial Sequence: Synthetic oligonucleotide
aaguacagcagcaugauugaa

SEQ ID NO: 1608 - RNA, 21 nt, Artificial Sequence
  Description of Artificial Sequence: Synthetic oligonucleotide
aguacagcagcaugauugaca

SEQ ID NO: 1609 - RNA, 21 nt, Artificial Sequence
  Description of Artificial Sequence: Synthetic oligonucleotide
aguacagcagcaugauugaca

SEQ ID NO: 1610 - RNA, 21 nt, Artificial Sequence
  Description of Artificial Sequence: Synthetic oligonucleotide
guacagcagcaugauugacua

SEQ ID NO: 1611 - RNA, 21 nt, Artificial Sequence
  Description of Artificial Sequence: Synthetic oligonucleotide
guacagcagcaugauugacua

SEQ ID NO: 1612 - RNA, 21 nt, Artificial Sequence
  Description of Artificial Sequence: Synthetic oligonucleotide
guacagcagcaugauugacua

SEQ ID NO: 1613 - RNA, 21 nt, Artificial Sequence
  Description of Artificial Sequence: Synthetic oligonucleotide
guacagcagcaugauugacua

SEQ ID NO: 1614 - RNA, 21 nt, Artificial Sequence
  Description of Artificial Sequence: Synthetic oligonucleotide
guacagcagcaugauugacua

SEQ ID NO: 1615 - RNA, 21 nt, Artificial Sequence
  Description of Artificial Sequence: Synthetic oligonucleotide
guacagcagcaugauugacua

SEQ ID NO: 1616 - RNA, 21 nt, Artificial Sequence
  Description of Artificial Sequence: Synthetic oligonucleotide
guacugcagcaugauugacua

SEQ ID NO: 1617 - RNA, 21 nt, Artificial Sequence
  Description of Artificial Sequence: Synthetic oligonucleotide
guagagcagcaugauugacua

SEQ ID NO: 1618 - RNA, 21 nt, Artificial Sequence
  Description of Artificial Sequence: Synthetic oligonucleotide
guucagcagcaugauugacua

SEQ ID NO: 1619 - RNA, 21 nt, Artificial Sequence
  Description of Artificial Sequence: Synthetic oligonucleotide
guacagcagcaugauugacua

SEQ ID NO: 1620 - RNA, 21 nt, Artificial Sequence
  Description of Artificial Sequence: Synthetic oligonucleotide
uacagcagcaugauugacuaa

SEQ ID NO: 1621 - RNA, 19 nt, Artificial Sequence
  Description of Artificial Sequence: Synthetic oligonucleotide
acagcagcaugauugacua

SEQ ID NO: 1622 - RNA, 21 nt, Artificial Sequence
  Description of Artificial Sequence: Synthetic oligonucleotide
acagcagcaugauugacuaca

SEQ ID NO: 1623 - RNA, 21 nt, Artificial Sequence
  Description of Artificial Sequence: Synthetic oligonucleotide
acagcagcaugauugacuaca

SEQ ID NO: 1624 - RNA, 21 nt, Artificial Sequence
  Description of Artificial Sequence: Synthetic oligonucleotide
acagcagcaugauugacuaca

SEQ ID NO: 1625 - RNA, 21 nt, Artificial Sequence
  Description of Artificial Sequence: Synthetic oligonucleotide
cagcagcaugauugacuacaa

SEQ ID NO: 1626 - RNA, 21 nt, Artificial Sequence
  Description of Artificial Sequence: Synthetic oligonucleotide
agcagcaugauugacuacaaa

SEQ ID NO: 1627 - RNA, 21 nt, Artificial Sequence
  Description of Artificial Sequence: Synthetic oligonucleotide
gcagcaugauugacuacaaca

SEQ ID NO: 1628 - RNA, 21 nt, Artificial Sequence
  Description of Artificial Sequence: Synthetic oligonucleotide
cagcaugauugacuacaacca

SEQ ID NO: 1629 - RNA, 21 nt, Artificial Sequence
  Description of Artificial Sequence: Synthetic oligonucleotide
gcaugauugacuacaacccca

SEQ ID NO: 1630 - RNA, 21 nt, Artificial Sequence
  Description of Artificial Sequence: Synthetic oligonucleotide
agcucuuugccugggacaaca

SEQ ID NO: 1631 - RNA, 21 nt, Artificial Sequence
  Description of Artificial Sequence: Synthetic oligonucleotide
agcucuuugccugggacaaca

SEQ ID NO: 1632 - RNA, 21 nt, Artificial Sequence
  Description of Artificial Sequence: Synthetic oligonucleotide
gccugggacaacuugaacaua

SEQ ID NO: 1633 - RNA, 21 nt, Artificial Sequence
  Description of Artificial Sequence: Synthetic oligonucleotide
gccugggacaacuugaacaua

SEQ ID NO: 1634 - RNA, 21 nt, Artificial Sequence
  Description of Artificial Sequence: Synthetic oligonucleotide
gccugggacaacuugaacaua

SEQ ID NO: 1635 - RNA, 21 nt, Artificial Sequence
  Description of Artificial Sequence: Synthetic oligonucleotide
cugggacaacuugaacaugga

SEQ ID NO: 1636 - RNA, 21 nt, Artificial Sequence
  Description of Artificial Sequence: Synthetic oligonucleotide
ugggacaacuugaacauggua

SEQ ID NO: 1637 - RNA, 21 nt, Artificial Sequence
  Description of Artificial Sequence: Synthetic oligonucleotide
gggacaacuugaacaugguca

SEQ ID NO: 1638 - RNA, 21 nt, Artificial Sequence
  Description of Artificial Sequence: Synthetic oligonucleotide
gggacaacuugaacaugguca

SEQ ID NO: 1639 - RNA, 21 nt, Artificial Sequence
  Description of Artificial Sequence: Synthetic oligonucleotide
ggacaacuugaacauggucaa

SEQ ID NO: 1640 - RNA, 21 nt, Artificial Sequence
  Description of Artificial Sequence: Synthetic oligonucleotide
gacaacuugaacauggucaca

SEQ ID NO: 1641 - RNA, 21 nt, Artificial Sequence
  Description of Artificial Sequence: Synthetic oligonucleotide
gacaacuugaacauggucaca

SEQ ID NO: 1642 - RNA, 21 nt, Artificial Sequence
  Description of Artificial Sequence: Synthetic oligonucleotide
acaacuugaacauggucacua

SEQ ID NO: 1643 - RNA, 21 nt, Artificial Sequence
  Description of Artificial Sequence: Synthetic oligonucleotide
acaacuugaacauggucacua

SEQ ID NO: 1644 - RNA, 21 nt, Artificial Sequence
  Description of Artificial Sequence: Synthetic oligonucleotide
caacuugaacauggucacuua

SEQ ID NO: 1645 - RNA, 21 nt, Artificial Sequence
  Description of Artificial Sequence: Synthetic oligonucleotide
aacuugaacauggucacuuaa

SEQ ID NO: 1646 - RNA, 21 nt, Artificial Sequence
  Description of Artificial Sequence: Synthetic oligonucleotide
acuugaacauggucacuuaua

SEQ ID NO: 1647 - RNA, 21 nt, Artificial Sequence
  Description of Artificial Sequence: Synthetic oligonucleotide
cuugaacauggucacuuauga

SEQ ID NO: 1648 - RNA, 21 nt, Artificial Sequence
  Description of Artificial Sequence: Synthetic oligonucleotide
cuugaacauggucacuuauga

SEQ ID NO: 1649 - RNA, 21 nt, Artificial Sequence
  Description of Artificial Sequence: Synthetic oligonucleotide
cuugaacauggucacuuauga

SEQ ID NO: 1650 - RNA, 21 nt, Artificial Sequence
  Description of Artificial Sequence: Synthetic oligonucleotide
cuugaacauggucacuuauga

SEQ ID NO: 1651 - RNA, 21 nt, Artificial Sequence
  Description of Artificial Sequence: Synthetic oligonucleotide
cuuguacauggucacuuauga

SEQ ID NO: 1652 - RNA, 21 nt, Artificial Sequence
  Description of Artificial Sequence: Synthetic oligonucleotide
cuucaacauggucacuuauga

SEQ ID NO: 1653 - RNA, 21 nt, Artificial Sequence
  Description of Artificial Sequence: Synthetic oligonucleotide
cuagaacauggucacuuauga

SEQ ID NO: 1654 - RNA, 21 nt, Artificial Sequence
  Description of Artificial Sequence: Synthetic oligonucleotide
cuugaacauggucacuuauga

SEQ ID NO: 1655 - RNA, 21 nt, Artificial Sequence
  Description of Artificial Sequence: Synthetic oligonucleotide
cuugaacauggucacuuauga

SEQ ID NO: 1656 - RNA, 21 nt, Artificial Sequence
  Description of Artificial Sequence: Synthetic oligonucleotide
cuugaacauggucacuuauga

SEQ ID NO: 1657 - RNA, 21 nt, Artificial Sequence
  Description of Artificial Sequence: Synthetic oligonucleotide
uugaacauggucacuuaugaa

SEQ ID NO: 1658 - RNA, 21 nt, Artificial Sequence
  Description of Artificial Sequence: Synthetic oligonucleotide
uugaacauggucacuuaugaa

SEQ ID NO: 1659 - RNA, 21 nt, Artificial Sequence
  Description of Artificial Sequence: Synthetic oligonucleotide
uugaacauggucacuuaugaa

SEQ ID NO: 1660 - RNA, 21 nt, Artificial Sequence
  Description of Artificial Sequence: Synthetic oligonucleotide
uugaacauggucacuuaugaa

SEQ ID NO: 1661 - RNA, 21 nt, Artificial Sequence
  Description of Artificial Sequence: Synthetic oligonucleotide
uugaucauggucacuuaugaa

SEQ ID NO: 1662 - RNA, 21 nt, Artificial Sequence
  Description of Artificial Sequence: Synthetic oligonucleotide
uuguacauggucacuuaugaa

SEQ ID NO: 1663 - RNA, 21 nt, Artificial Sequence
  Description of Artificial Sequence: Synthetic oligonucleotide
uucaacauggucacuuaugaa

SEQ ID NO: 1664 - RNA, 21 nt, Artificial Sequence
  Description of Artificial Sequence: Synthetic oligonucleotide
uugaacauggucacuuaugaa

SEQ ID NO: 1665 - RNA, 21 nt, Artificial Sequence
  Description of Artificial Sequence: Synthetic oligonucleotide
uugaacauggucacuuaugaa

SEQ ID NO: 1666 - RNA, 19 nt, Artificial Sequence
  Description of Artificial Sequence: Synthetic oligonucleotide
ugaacauggucacuuauga

SEQ ID NO: 1667 - RNA, 21 nt, Artificial Sequence
  Description of Artificial Sequence: Synthetic oligonucleotide
ugaacauggucacuuaugaca

SEQ ID NO: 1668 - RNA, 19 nt, Artificial Sequence
  Description of Artificial Sequence: Synthetic oligonucleotide
gaacauggucacuuaugaa

SEQ ID NO: 1669 - RNA, 21 nt, Artificial Sequence
  Description of Artificial Sequence: Synthetic oligonucleotide
gaacauggucacuuaugacaa

SEQ ID NO: 1670 - RNA, 21 nt, Artificial Sequence
  Description of Artificial Sequence: Synthetic oligonucleotide
aacauggucacuuaugacaua

SEQ ID NO: 1671 - RNA, 21 nt, Artificial Sequence
  Description of Artificial Sequence: Synthetic oligonucleotide
acauggucacuuaugacauca

SEQ ID NO: 1672 - RNA, 21 nt, Artificial Sequence
  Description of Artificial Sequence: Synthetic oligonucleotide
acauggucacuuaugacauca

SEQ ID NO: 1673 - RNA, 21 nt, Artificial Sequence
  Description of Artificial Sequence: Synthetic oligonucleotide
acauggucacuuaugacauca

SEQ ID NO: 1674 - RNA, 21 nt, Artificial Sequence
  Description of Artificial Sequence: Synthetic oligonucleotide
cauggucacuuaugacaucaa

SEQ ID NO: 1675 - RNA, 21 nt, Artificial Sequence
  Description of Artificial Sequence: Synthetic oligonucleotide
auggucacuuaugacaucaaa

SEQ ID NO: 1676 - RNA, 21 nt, Artificial Sequence
  Description of Artificial Sequence: Synthetic oligonucleotide
uggucacuuaugacaucaaga

SEQ ID NO: 1677 - RNA, 21 nt, Artificial Sequence
  Description of Artificial Sequence: Synthetic oligonucleotide
ggucacuuaugacaucaagca

SEQ ID NO: 1678 - RNA, 21 nt, Artificial Sequence
  Description of Artificial Sequence: Synthetic oligonucleotide
gucacuuaugacaucaagcua

SEQ ID NO: 1679 - RNA, 21 nt, Artificial Sequence
  Description of Artificial Sequence: Synthetic oligonucleotide
gcagaaggagaugcucaggga

SEQ ID NO: 1680 - RNA, 21 nt, Artificial Sequence
  Description of Artificial Sequence: Synthetic oligonucleotide
aagggagagccagccagccaa

SEQ ID NO: 1681 - RNA, 21 nt, Artificial Sequence
  Description of Artificial Sequence: Synthetic oligonucleotide
gaugaacauggucaccaucua

SEQ ID NO: 1682 - RNA, 21 nt, Artificial Sequence
  Description of Artificial Sequence: Synthetic oligonucleotide
gcauuuaugggauguuuaaua

SEQ ID NO: 1683 - RNA, 21 nt, Artificial Sequence
  Description of Artificial Sequence: Synthetic oligonucleotide
uguuuaaugacauaguucaaa

SEQ ID NO: 1684 - RNA, 21 nt, Artificial Sequence
  Description of Artificial Sequence: Synthetic oligonucleotide
uguuuaaugacauaguucaaa

SEQ ID NO: 1685 - RNA, 21 nt, Artificial Sequence
  Description of Artificial Sequence: Synthetic oligonucleotide
uguuuaaugacauaguucaaa

SEQ ID NO: 1686 - RNA, 21 nt, Artificial Sequence
  Description of Artificial Sequence: Synthetic oligonucleotide
guuuaaugacauaguucaaga

SEQ ID NO: 1687 - RNA, 21 nt, Artificial Sequence
  Description of Artificial Sequence: Synthetic oligonucleotide
guuuaaugacauaguucaaga

SEQ ID NO: 1688 - RNA, 21 nt, Artificial Sequence
  Description of Artificial Sequence: Synthetic oligonucleotide
uuuaaugacauaguucaagua

SEQ ID NO: 1689 - RNA, 21 nt, Artificial Sequence
  Description of Artificial Sequence: Synthetic oligonucleotide
uuaaugacauaguucaaguua

SEQ ID NO: 1690 - RNA, 21 nt, Artificial Sequence
  Description of Artificial Sequence: Synthetic oligonucleotide
uaaugacauaguucaaguuua

SEQ ID NO: 1691 - RNA, 21 nt, Artificial Sequence
  Description of Artificial Sequence: Synthetic oligonucleotide
uaaugacauaguucaaguuua

SEQ ID NO: 1692 - RNA, 21 nt, Artificial Sequence
  Description of Artificial Sequence: Synthetic oligonucleotide
aaugacauaguucaaguuuua

SEQ ID NO: 1693 - RNA, 21 nt, Artificial Sequence
  Description of Artificial Sequence: Synthetic oligonucleotide
aaugacauaguucaaguuuua

SEQ ID NO: 1694 - RNA, 21 nt, Artificial Sequence
  Description of Artificial Sequence: Synthetic oligonucleotide
augacauaguucaaguuuuca

SEQ ID NO: 1695 - RNA, 21 nt, Artificial Sequence
  Description of Artificial Sequence: Synthetic oligonucleotide
ugacauaguucaaguuuucua

SEQ ID NO: 1696 - RNA, 21 nt, Artificial Sequence
  Description of Artificial Sequence: Synthetic oligonucleotide
gacauaguucaaguuuucuua

SEQ ID NO: 1697 - RNA, 21 nt, Artificial Sequence
  Description of Artificial Sequence: Synthetic oligonucleotide
acauaguucaaguuuucuuga

SEQ ID NO: 1698 - RNA, 21 nt, Artificial Sequence
  Description of Artificial Sequence: Synthetic oligonucleotide
acauaguucaaguuuucuuga

SEQ ID NO: 1699 - RNA, 21 nt, Artificial Sequence
  Description of Artificial Sequence: Synthetic oligonucleotide
acauaguucaaguuuucuuga

SEQ ID NO: 1700 - RNA, 21 nt, Artificial Sequence
  Description of Artificial Sequence: Synthetic oligonucleotide
acauaguucaaguuuucuuga

SEQ ID NO: 1701 - RNA, 21 nt, Artificial Sequence
  Description of Artificial Sequence: Synthetic oligonucleotide
acauuguucaaguuuucuuga

SEQ ID NO: 1702 - RNA, 21 nt, Artificial Sequence
  Description of Artificial Sequence: Synthetic oligonucleotide
acaaaguucaaguuuucuuga

SEQ ID NO: 1703 - RNA, 21 nt, Artificial Sequence
  Description of Artificial Sequence: Synthetic oligonucleotide
acuuaguucaaguuuucuuga

SEQ ID NO: 1704 - RNA, 21 nt, Artificial Sequence
  Description of Artificial Sequence: Synthetic oligonucleotide
acauaguucaaguuuucuuga

SEQ ID NO: 1705 - RNA, 21 nt, Artificial Sequence
  Description of Artificial Sequence: Synthetic oligonucleotide
cauaguucaaguuuucuugua

SEQ ID NO: 1706 - RNA, 19 nt, Artificial Sequence
  Description of Artificial Sequence: Synthetic oligonucleotide
auaguucaaguuuucuuga

SEQ ID NO: 1707 - RNA, 19 nt, Artificial Sequence
  Description of Artificial Sequence: Synthetic oligonucleotide
auaguucaaguuuucuuga

SEQ ID NO: 1708 - RNA, 21 nt, Artificial Sequence
  Description of Artificial Sequence: Synthetic oligonucleotide
auaguucaaguuuucuuguga

SEQ ID NO: 1709 - RNA, 21 nt, Artificial Sequence
  Description of Artificial Sequence: Synthetic oligonucleotide
uaguucaaguuuucuugugaa

SEQ ID NO: 1710 - RNA, 21 nt, Artificial Sequence
  Description of Artificial Sequence: Synthetic oligonucleotide
uaguucaaguuuucuugugaa

SEQ ID NO: 1711 - RNA, 21 nt, Artificial Sequence
  Description of Artificial Sequence: Synthetic oligonucleotide
aguucaaguuuucuugugaua

SEQ ID NO: 1712 - RNA, 21 nt, Artificial Sequence
  Description of Artificial Sequence: Synthetic oligonucleotide
aguucaaguuuucuugugaua

SEQ ID NO: 1713 - RNA, 21 nt, Artificial Sequence
  Description of Artificial Sequence: Synthetic oligonucleotide
guucaaguuuucuugugauua

SEQ ID NO: 1714 - RNA, 21 nt, Artificial Sequence
  Description of Artificial Sequence: Synthetic oligonucleotide
guucaaguuuucuugugauua

SEQ ID NO: 1715 - RNA, 21 nt, Artificial Sequence
  Description of Artificial Sequence: Synthetic oligonucleotide
uucaaguuuucuugugauuua

SEQ ID NO: 1716 - RNA, 21 nt, Artificial Sequence
  Description of Artificial Sequence: Synthetic oligonucleotide
ucaaguuuucuugugauuuga

SEQ ID NO: 1717 - RNA, 21 nt, Artificial Sequence
  Description of Artificial Sequence: Synthetic oligonucleotide
ucaaguuuucuugugauuuga

SEQ ID NO: 1718 - RNA, 21 nt, Artificial Sequence
  Description of Artificial Sequence: Synthetic oligonucleotide
ucaaguuuucuugugauuuga

SEQ ID NO: 1719 - RNA, 21 nt, Artificial Sequence
  Description of Artificial Sequence: Synthetic oligonucleotide
ucaaguuuucuugugauuuga

SEQ ID NO: 1720 - RNA, 21 nt, Artificial Sequence
  Description of Artificial Sequence: Synthetic oligonucleotide
caaguuuucuugugauuugga

SEQ ID NO: 1721 - RNA, 21 nt, Artificial Sequence
  Description of Artificial Sequence: Synthetic oligonucleotide
aaguuuucuugugauuuggga

SEQ ID NO: 1722 - RNA, 21 nt, Artificial Sequence
  Description of Artificial Sequence: Synthetic oligonucleotide
ugaaaaccauugcucuugcaa

SEQ ID NO: 1723 - RNA, 21 nt, Artificial Sequence
  Description of Artificial Sequence: Synthetic oligonucleotide
gaaaaccauugcucuugcaua

SEQ ID NO: 1724 - RNA, 21 nt, Artificial Sequence
  Description of Artificial Sequence: Synthetic oligonucleotide
gaaaaccauugcucuugcaua

SEQ ID NO: 1725 - RNA, 21 nt, Artificial Sequence
  Description of Artificial Sequence: Synthetic oligonucleotide
aaaaccauugcucuugcauga

SEQ ID NO: 1726 - RNA, 21 nt, Artificial Sequence
  Description of Artificial Sequence: Synthetic oligonucleotide
aaaaccauugcucuugcauga

SEQ ID NO: 1727 - RNA, 21 nt, Artificial Sequence
  Description of Artificial Sequence: Synthetic oligonucleotide
aaaccauugcucuugcaugua

SEQ ID NO: 1728 - RNA, 21 nt, Artificial Sequence
  Description of Artificial Sequence: Synthetic oligonucleotide
aaaccauugcucuugcaugua

SEQ ID NO: 1729 - RNA, 21 nt, Artificial Sequence
  Description of Artificial Sequence: Synthetic oligonucleotide
aaccauugcucuugcauguua

SEQ ID NO: 1730 - RNA, 21 nt, Artificial Sequence
  Description of Artificial Sequence: Synthetic oligonucleotide
accauugcucuugcauguuaa

SEQ ID NO: 1731 - RNA, 21 nt, Artificial Sequence
  Description of Artificial Sequence: Synthetic oligonucleotide
ccauugcucuugcauguuaca

SEQ ID NO: 1732 - RNA, 21 nt, Artificial Sequence
  Description of Artificial Sequence: Synthetic oligonucleotide
cauugcucuugcauguuacaa

SEQ ID NO: 1733 - RNA, 21 nt, Artificial Sequence
  Description of Artificial Sequence: Synthetic oligonucleotide
cauugcucuugcauguuacaa

SEQ ID NO: 1734 - RNA, 21 nt, Artificial Sequence
  Description of Artificial Sequence: Synthetic oligonucleotide
auugcucuugcauguuacaua

SEQ ID NO: 1735 - RNA, 21 nt, Artificial Sequence
  Description of Artificial Sequence: Synthetic oligonucleotide
uugcucuugcauguuacauga

SEQ ID NO: 1736 - RNA, 21 nt, Artificial Sequence
  Description of Artificial Sequence: Synthetic oligonucleotide
uugcucuugcauguuacauga

SEQ ID NO: 1737 - RNA, 21 nt, Artificial Sequence
  Description of Artificial Sequence: Synthetic oligonucleotide
uugcacuugcauguuacauga

SEQ ID NO: 1738 - RNA, 21 nt, Artificial Sequence
  Description of Artificial Sequence: Synthetic oligonucleotide
uuggucuugcauguuacauga

SEQ ID NO: 1739 - RNA, 21 nt, Artificial Sequence
  Description of Artificial Sequence: Synthetic oligonucleotide
uuccucuugcauguuacauga

SEQ ID NO: 1740 - RNA, 21 nt, Artificial Sequence
  Description of Artificial Sequence: Synthetic oligonucleotide
uugcucuugcauguuacauga

SEQ ID NO: 1741 - RNA, 21 nt, Artificial Sequence
  Description of Artificial Sequence: Synthetic oligonucleotide
uugcucuugcauguuacauga

SEQ ID NO: 1742 - RNA, 21 nt, Artificial Sequence
  Description of Artificial Sequence: Synthetic oligonucleotide
uugcucuugcauguuacauga

SEQ ID NO: 1743 - RNA, 21 nt, Artificial Sequence
  Description of Artificial Sequence: Synthetic oligonucleotide
ugcucuugcauguuacaugga

SEQ ID NO: 1744 - RNA, 19 nt, Artificial Sequence
  Description of Artificial Sequence: Synthetic oligonucleotide
gcucuugcauguuacauga

SEQ ID NO: 1745 - RNA, 21 nt, Artificial Sequence
  Description of Artificial Sequence: Synthetic oligonucleotide
gcucuugcauguuacauggua

SEQ ID NO: 1746 - RNA, 21 nt, Artificial Sequence
  Description of Artificial Sequence: Synthetic oligonucleotide
cucuugcauguuacaugguua

SEQ ID NO: 1747 - RNA, 21 nt, Artificial Sequence
  Description of Artificial Sequence: Synthetic oligonucleotide
cucuugcauguuacaugguua

SEQ ID NO: 1748 - RNA, 21 nt, Artificial Sequence
  Description of Artificial Sequence: Synthetic oligonucleotide
ucuugcauguuacaugguuaa

SEQ ID NO: 1749 - RNA, 21 nt, Artificial Sequence
  Description of Artificial Sequence: Synthetic oligonucleotide
cuugcauguuacaugguuaca

SEQ ID NO: 1750 - RNA, 21 nt, Artificial Sequence
  Description of Artificial Sequence: Synthetic oligonucleotide
cuugcauguuacaugguuaca

SEQ ID NO: 1751 - RNA, 21 nt, Artificial Sequence
  Description of Artificial Sequence: Synthetic oligonucleotide
uugcauguuacaugguuacca

SEQ ID NO: 1752 - RNA, 21 nt, Artificial Sequence
  Description of Artificial Sequence: Synthetic oligonucleotide
uugcauguuacaugguuacca

SEQ ID NO: 1753 - RNA, 21 nt, Artificial Sequence
  Description of Artificial Sequence: Synthetic oligonucleotide
uugcauguuacaugguuacca

SEQ ID NO: 1754 - RNA, 21 nt, Artificial Sequence
  Description of Artificial Sequence: Synthetic oligonucleotide
ugcauguuacaugguuaccaa

SEQ ID NO: 1755 - RNA, 21 nt, Artificial Sequence
  Description of Artificial Sequence: Synthetic oligonucleotide
gcauguuacaugguuaccaca

SEQ ID NO: 1756 - RNA, 21 nt, Artificial Sequence
  Description of Artificial Sequence: Synthetic oligonucleotide
gcauguuacaugguuaccaca

SEQ ID NO: 1757 - RNA, 21 nt, Artificial Sequence
  Description of Artificial Sequence: Synthetic oligonucleotide
cauguuacaugguuaccacaa

SEQ ID NO: 1758 - RNA, 21 nt, Artificial Sequence
  Description of Artificial Sequence: Synthetic oligonucleotide
auguuacaugguuaccacaaa

SEQ ID NO: 1759 - RNA, 21 nt, Artificial Sequence
  Description of Artificial Sequence: Synthetic oligonucleotide
uguuacaugguuaccacaaga

SEQ ID NO: 1760 - RNA, 21 nt, Artificial Sequence
  Description of Artificial Sequence: Synthetic oligonucleotide
cuccucuggccagcaucgaaa

SEQ ID NO: 1761 - RNA, 21 nt, Artificial Sequence
  Description of Artificial Sequence: Synthetic oligonucleotide
auauaaguaagaugcauuuaa

SEQ ID NO: 1762 - RNA, 21 nt, Artificial Sequence
  Description of Artificial Sequence: Synthetic oligonucleotide
uauaaguaagaugcauuuaca

SEQ ID NO: 1763 - RNA, 21 nt, Artificial Sequence
  Description of Artificial Sequence: Synthetic oligonucleotide
auaaguaagaugcauuuacua

SEQ ID NO: 1764 - RNA, 21 nt, Artificial Sequence
  Description of Artificial Sequence: Synthetic oligonucleotide
uaaguaagaugcauuuacuaa

SEQ ID NO: 1765 - RNA, 21 nt, Artificial Sequence
  Description of Artificial Sequence: Synthetic oligonucleotide
aaguaagaugcauuuacuaca

SEQ ID NO: 1766 - RNA, 21 nt, Artificial Sequence
  Description of Artificial Sequence: Synthetic oligonucleotide
aaguaagaugcauuuacuaca

SEQ ID NO: 1767 - RNA, 21 nt, Artificial Sequence
  Description of Artificial Sequence: Synthetic oligonucleotide
aaguaagaugcauuuacuaca

SEQ ID NO: 1768 - RNA, 21 nt, Artificial Sequence
  Description of Artificial Sequence: Synthetic oligonucleotide
aaguaagaugcauuuacuaca

SEQ ID NO: 1769 - RNA, 21 nt, Artificial Sequence
  Description of Artificial Sequence: Synthetic oligonucleotide
aaguaagaugcauuuacuaca

SEQ ID NO: 1770 - DNA, 21 bp, Artificial Sequence
  Description of Artificial Sequence: Synthetic oligonucleotide
  Description of Combined DNA/RNA Molecule: Synthetic oligonucleotide
aaguaagatgcauuuacuaca

SEQ ID NO: 1771 - RNA, 21 nt, Artificial Sequence
  Description of Artificial Sequence: Synthetic oligonucleotide
aaguaagaugcauuuacuaca

SEQ ID NO: 1772 - RNA, 21 nt, Artificial Sequence
  Description of Artificial Sequence: Synthetic oligonucleotide
aaguuagaugcauuuacuaca

SEQ ID NO: 1773 - RNA, 21 nt, Artificial Sequence
  Description of Artificial Sequence: Synthetic oligonucleotide
aagaaagaugcauuuacuaca

SEQ ID NO: 1774 - RNA, 21 nt, Artificial Sequence
  Description of Artificial Sequence: Synthetic oligonucleotide
aacuaagaugcauuuacuaca

SEQ ID NO: 1775 - RNA, 21 nt, Artificial Sequence
  Description of Artificial Sequence: Synthetic oligonucleotide
aaguaagaugcauuuacuaca

SEQ ID NO: 1776 - RNA, 21 nt, Artificial Sequence
  Description of Artificial Sequence: Synthetic oligonucleotide
aaguaagaugcauuuacuaca

SEQ ID NO: 1777 - RNA, 21 nt, Artificial Sequence
  Description of Artificial Sequence: Synthetic oligonucleotide
aguaagaugcauuuacuacaa

SEQ ID NO: 1778 - RNA, 19 nt, Artificial Sequence
  Description of Artificial Sequence: Synthetic oligonucleotide
guaagaugcauuuacuaca

SEQ ID NO: 1779 - RNA, 21 nt, Artificial Sequence
  Description of Artificial Sequence: Synthetic oligonucleotide
uuggcuucuaaugcuucagaa

SEQ ID NO: 1780 - RNA, 21 nt, Artificial Sequence
  Description of Artificial Sequence: Synthetic oligonucleotide
cuucuaaugcuucagauagaa

SEQ ID NO: 1781 - RNA, 21 nt, Artificial Sequence
  Description of Artificial Sequence: Synthetic oligonucleotide
cuucuaaugcuucagauagaa

SEQ ID NO: 1782 - RNA, 21 nt, Artificial Sequence
  Description of Artificial Sequence: Synthetic oligonucleotide
cuucuaaugcuucagauagaa

SEQ ID NO: 1783 - DNA, 23 bp, Artificial Sequence
  Description of Artificial Sequence: Synthetic oligonucleotide
  Description of Combined DNA/RNA Molecule: Synthetic oligonucleotide
uaagctcugcugugcugagaggu

SEQ ID NO: 1784 - DNA, 23 bp, Artificial Sequence
  Description of Artificial Sequence: Synthetic oligonucleotide
  Description of Combined DNA/RNA Molecule: Synthetic oligonucleotide
uaagctctgcugugcugagaggu

SEQ ID NO: 1785 - RNA, 23 nt, Artificial Sequence
  Description of Artificial Sequence: Synthetic oligonucleotide
uaagcucugcugugcugagaggu

SEQ ID NO: 1786 - DNA, 23 bp, Artificial Sequence
  Description of Artificial Sequence: Synthetic oligonucleotide
  Description of Combined DNA/RNA Molecule: Synthetic oligonucleotide
uaaagctcugcugugcugagagg

SEQ ID NO: 1787 - DNA, 23 bp, Artificial Sequence
  Description of Artificial Sequence: Synthetic oligonucleotide
  Description of Combined DNA/RNA Molecule: Synthetic oligonucleotide
uucctctggaaagcucugcugug

SEQ ID NO: 1788 - RNA, 23 nt, Artificial Sequence
  Description of Artificial Sequence: Synthetic oligonucleotide
ugugcacagaagaaccucauugc

SEQ ID NO: 1789 - RNA, 23 nt, Artificial Sequence
  Description of Artificial Sequence: Synthetic oligonucleotide
ugugcacagaagaaccucauugc

SEQ ID NO: 1790 - RNA, 23 nt, Artificial Sequence
  Description of Artificial Sequence: Synthetic oligonucleotide
ucgugcacagaagaaccucauug

SEQ ID NO: 1791 - RNA, 23 nt, Artificial Sequence
  Description of Artificial Sequence: Synthetic oligonucleotide
uacgugcacagaagaaccucauu

SEQ ID NO: 1792 - DNA, 23 bp, Artificial Sequence
  Description of Artificial Sequence: Synthetic oligonucleotide
  Description of Combined DNA/RNA Molecule: Synthetic oligonucleotide
uacgtgcacagaagaaccucauu

SEQ ID NO: 1793 - RNA, 23 nt, Artificial Sequence
  Description of Artificial Sequence: Synthetic oligonucleotide
uaacgugcacagaagaaccucau

SEQ ID NO: 1794 - RNA, 23 nt, Artificial Sequence
  Description of Artificial Sequence: Synthetic oligonucleotide
ucaacgugcacagaagaaccuca

SEQ ID NO: 1795 - DNA, 23 bp, Artificial Sequence
  Description of Artificial Sequence: Synthetic oligonucleotide
  Description of Combined DNA/RNA Molecule: Synthetic oligonucleotide
ucaacgtgcacagaagaaccucg

SEQ ID NO: 1796 - DNA, 23 bp, Artificial Sequence
  Description of Artificial Sequence: Synthetic oligonucleotide
  Description of Combined DNA/RNA Molecule: Synthetic oligonucleotide
ucaacgtgcacagaagaaccucg

SEQ ID NO: 1797 - DNA, 23 bp, Artificial Sequence
  Description of Artificial Sequence: Synthetic oligonucleotide
  Description of Combined DNA/RNA Molecule: Synthetic oligonucleotide
ucaacgtgcacagaagaaccucg

SEQ ID NO: 1798 - DNA, 23 bp, Artificial Sequence
  Description of Artificial Sequence: Synthetic oligonucleotide
  Description of Combined DNA/RNA Molecule: Synthetic oligonucleotide
ucaacgtgcacagaaguaccucg

SEQ ID NO: 1799 - DNA, 23 bp, Artificial Sequence
  Description of Artificial Sequence: Synthetic oligonucleotide
  Description of Combined DNA/RNA Molecule: Synthetic oligonucleotide
ucaacgtgcacagaagauccucg

SEQ ID NO: 1800 - DNA, 23 bp, Artificial Sequence
  Description of Artificial Sequence: Synthetic oligonucleotide
  Description of Combined DNA/RNA Molecule: Synthetic oligonucleotide
ucaacgtgcacagaagaagcucg

SEQ ID NO: 1801 - DNA, 23 bp, Artificial Sequence
  Description of Artificial Sequence: Synthetic oligonucleotide
  Description of Combined DNA/RNA Molecule: Synthetic oligonucleotide
ucaacgtgcacagaagaaccuca

SEQ ID NO: 1802 - RNA, 23 nt, Artificial Sequence
  Description of Artificial Sequence: Synthetic oligonucleotide
ugcaacgugcacagaagaaccuc

SEQ ID NO: 1803 - RNA, 23 nt, Artificial Sequence
  Description of Artificial Sequence: Synthetic oligonucleotide
ugcaacgugcacagaagaaccuc

SEQ ID NO: 1804 - DNA, 21 bp, Artificial Sequence
  Description of Artificial Sequence: Synthetic oligonucleotide
  Description of Combined DNA/RNA Molecule: Synthetic oligonucleotide
ucaacgtgcacagaagaaccu

SEQ ID NO: 1805 - RNA, 23 nt, Artificial Sequence
  Description of Artificial Sequence: Synthetic oligonucleotide
uagcaacgugcacagaagaaccu

SEQ ID NO: 1806 - RNA, 23 nt, Artificial Sequence
  Description of Artificial Sequence: Synthetic oligonucleotide
ucagcaacgugcacagaagaacc

SEQ ID NO: 1807 - RNA, 23 nt, Artificial Sequence
  Description of Artificial Sequence: Synthetic oligonucleotide
ugcagcaacgugcacagaagaac

SEQ ID NO: 1808 - RNA, 23 nt, Artificial Sequence
  Description of Artificial Sequence: Synthetic oligonucleotide
ugcagcaacgugcacagaagaac

SEQ ID NO: 1809 - RNA, 23 nt, Artificial Sequence
  Description of Artificial Sequence: Synthetic oligonucleotide
uugcagcaacgugcacagaagaa

SEQ ID NO: 1810 - RNA, 23 nt, Artificial Sequence
  Description of Artificial Sequence: Synthetic oligonucleotide
uugcagcaacgugcacagaagaa

SEQ ID NO: 1811 - RNA, 23 nt, Artificial Sequence
  Description of Artificial Sequence: Synthetic oligonucleotide
ucugcagcaacgugcacagaaga

SEQ ID NO: 1812 - RNA, 23 nt, Artificial Sequence
  Description of Artificial Sequence: Synthetic oligonucleotide
ugcugcagcaacgugcacagaag

SEQ ID NO: 1813 - RNA, 23 nt, Artificial Sequence
  Description of Artificial Sequence: Synthetic oligonucleotide
uagcugcagcaacgugcacagaa

SEQ ID NO: 1814 - DNA, 23 bp, Artificial Sequence
  Description of Artificial Sequence: Synthetic oligonucleotide
  Description of Combined DNA/RNA Molecule: Synthetic oligonucleotide
uagctgcagcaacgugcacagaa

SEQ ID NO: 1815 - RNA, 23 nt, Artificial Sequence
  Description of Artificial Sequence: Synthetic oligonucleotide
uaagcugcagcaacgugcacaga

SEQ ID NO: 1816 - DNA, 23 bp, Artificial Sequence
  Description of Artificial Sequence: Synthetic oligonucleotide
  Description of Combined DNA/RNA Molecule: Synthetic oligonucleotide
uaaagctgcagcaacgugcacag

SEQ ID NO: 1817 - RNA, 23 nt, Artificial Sequence
  Description of Artificial Sequence: Synthetic oligonucleotide
uccaaagcugcagcaacgugcac

SEQ ID NO: 1818 - RNA, 23 nt, Artificial Sequence
  Description of Artificial Sequence: Synthetic oligonucleotide
ucccaaagcugcagcaacgugca

SEQ ID NO: 1819 - DNA, 23 bp, Artificial Sequence
  Description of Artificial Sequence: Synthetic oligonucleotide
  Description of Combined DNA/RNA Molecule: Synthetic oligonucleotide
uagctggacagcuggcaucucag

SEQ ID NO: 1820 - DNA, 23 bp, Artificial Sequence
  Description of Artificial Sequence: Synthetic oligonucleotide
  Description of Combined DNA/RNA Molecule: Synthetic oligonucleotide
ugcagctggacagcuggcaucuc

SEQ ID NO: 1821 - RNA, 23 nt, Artificial Sequence
  Description of Artificial Sequence: Synthetic oligonucleotide
ucagaagcagcagcuggacagcu

SEQ ID NO: 1822 - RNA, 23 nt, Artificial Sequence
  Description of Artificial Sequence: Synthetic oligonucleotide
uaggccagaagcagcagcuggac

SEQ ID NO: 1823 - RNA, 23 nt, Artificial Sequence
  Description of Artificial Sequence: Synthetic oligonucleotide
uucccacaccaggcaggccagaa

SEQ ID NO: 1824 - RNA, 23 nt, Artificial Sequence
  Description of Artificial Sequence: Synthetic oligonucleotide
uucccacaccaggcaggccagaa

SEQ ID NO: 1825 - RNA, 23 nt, Artificial Sequence
  Description of Artificial Sequence: Synthetic oligonucleotide
uucccacaccaggcaggccagaa

SEQ ID NO: 1826 - RNA, 23 nt, Artificial Sequence
  Description of Artificial Sequence: Synthetic oligonucleotide
uaucccacaccaggcaggccaga

SEQ ID NO: 1827 - DNA, 23 bp, Artificial Sequence
  Description of Artificial Sequence: Synthetic oligonucleotide
  Description of Combined DNA/RNA Molecule: Synthetic oligonucleotide
uacatcacacaccaggcaggcca

SEQ ID NO: 1828 - DNA, 23 bp, Artificial Sequence
  Description of Artificial Sequence: Synthetic oligonucleotide
  Description of Combined DNA/RNA Molecule: Synthetic oligonucleotide
uacatcccacaccaggcaggcca

SEQ ID NO: 1829 - RNA, 23 nt, Artificial Sequence
  Description of Artificial Sequence: Synthetic oligonucleotide
uauacuggcaucggccacucugg

SEQ ID NO: 1830 - DNA, 23 bp, Artificial Sequence
  Description of Artificial Sequence: Synthetic oligonucleotide
  Description of Combined DNA/RNA Molecule: Synthetic oligonucleotide
uucatugggacuggccacacuga

SEQ ID NO: 1831 - DNA, 23 bp, Artificial Sequence
  Description of Artificial Sequence: Synthetic oligonucleotide
  Description of Combined DNA/RNA Molecule: Synthetic oligonucleotide
uuucautgggacuggccacacug

SEQ ID NO: 1832 - DNA, 23 bp, Artificial Sequence
  Description of Artificial Sequence: Synthetic oligonucleotide
  Description of Combined DNA/RNA Molecule: Synthetic oligonucleotide
utucautgggacuggccacacug

SEQ ID NO: 1833 - DNA, 23 bp, Artificial Sequence
  Description of Artificial Sequence: Synthetic oligonucleotide
  Description of Combined DNA/RNA Molecule: Synthetic oligonucleotide
ugatgacugacauggccuggcuc

SEQ ID NO: 1834 - DNA, 23 bp, Artificial Sequence
  Description of Artificial Sequence: Synthetic oligonucleotide
  Description of Combined DNA/RNA Molecule: Synthetic oligonucleotide
ugaugactgacauggccuggcuc

SEQ ID NO: 1835 - RNA, 23 nt, Artificial Sequence
  Description of Artificial Sequence: Synthetic oligonucleotide
ugaugacugacauggccuggcuc

SEQ ID NO: 1836 - RNA, 23 nt, Artificial Sequence
  Description of Artificial Sequence: Synthetic oligonucleotide
uuauggaugacugacauggccug

SEQ ID NO: 1837 - DNA, 23 bp, Artificial Sequence
  Description of Artificial Sequence: Synthetic oligonucleotide
  Description of Combined DNA/RNA Molecule: Synthetic oligonucleotide
ugcutugguggccuccaggucua

SEQ ID NO: 1838 - DNA, 23 bp, Artificial Sequence
  Description of Artificial Sequence: Synthetic oligonucleotide
  Description of Combined DNA/RNA Molecule: Synthetic oligonucleotide
ucgagctuugguggccuccaggu

SEQ ID NO: 1839 - DNA, 23 bp, Artificial Sequence
  Description of Artificial Sequence: Synthetic oligonucleotide
  Description of Combined DNA/RNA Molecule: Synthetic oligonucleotide
uaactctcugguuuggguuucca

SEQ ID NO: 1840 - DNA, 23 bp, Artificial Sequence
  Description of Artificial Sequence: Synthetic oligonucleotide
  Description of Combined DNA/RNA Molecule: Synthetic oligonucleotide
uugtctcggaggagguugcugua

SEQ ID NO: 1841 - RNA, 23 nt, Artificial Sequence
  Description of Artificial Sequence: Synthetic oligonucleotide
uugucucggaggagguugcugua

SEQ ID NO: 1842 - DNA, 23 bp, Artificial Sequence
  Description of Artificial Sequence: Synthetic oligonucleotide
  Description of Combined DNA/RNA Molecule: Synthetic oligonucleotide
ucutgtcucggaggagguugcug

SEQ ID NO: 1843 - DNA, 23 bp, Artificial Sequence
  Description of Artificial Sequence: Synthetic oligonucleotide
  Description of Combined DNA/RNA Molecule: Synthetic oligonucleotide
ucuugtctcggaggagguugcug

SEQ ID NO: 1844 - RNA, 23 nt, Artificial Sequence
  Description of Artificial Sequence: Synthetic oligonucleotide
ucuugucucggaggagguugcug

SEQ ID NO: 1845 - DNA, 23 bp, Artificial Sequence
  Description of Artificial Sequence: Synthetic oligonucleotide
  Description of Combined DNA/RNA Molecule: Synthetic oligonucleotide
uccuccagaactgacuugucucg

SEQ ID NO: 1846 - DNA, 23 bp, Artificial Sequence
  Description of Artificial Sequence: Synthetic oligonucleotide
  Description of Combined DNA/RNA Molecule: Synthetic oligonucleotide
ucuucctccagaacugacuuguc

SEQ ID NO: 1847 - DNA, 23 bp, Artificial Sequence
  Description of Artificial Sequence: Synthetic oligonucleotide
  Description of Combined DNA/RNA Molecule: Synthetic oligonucleotide
uucucutccuccagaacugacuu

SEQ ID NO: 1848 - DNA, 23 bp, Artificial Sequence
  Description of Artificial Sequence: Synthetic oligonucleotide
  Description of Combined DNA/RNA Molecule: Synthetic oligonucleotide
ucaacctccuggccagauucuca

SEQ ID NO: 1849 - DNA, 23 bp, Artificial Sequence
  Description of Artificial Sequence: Synthetic oligonucleotide
  Description of Combined DNA/RNA Molecule: Synthetic oligonucleotide
ugctutccaaccuccuggccaga

SEQ ID NO: 1850 - DNA, 23 bp, Artificial Sequence
  Description of Artificial Sequence: Synthetic oligonucleotide
  Description of Combined DNA/RNA Molecule: Synthetic oligonucleotide
ugcutuccaaccuccuggccaga

SEQ ID NO: 1851 - DNA, 23 bp, Artificial Sequence
  Description of Artificial Sequence: Synthetic oligonucleotide
  Description of Combined DNA/RNA Molecule: Synthetic oligonucleotide
ugcctugcuaccuccuggcugcu

SEQ ID NO: 1852 - DNA, 23 bp, Artificial Sequence
  Description of Artificial Sequence: Synthetic oligonucleotide
  Description of Combined DNA/RNA Molecule: Synthetic oligonucleotide
uuuctctggagccugguggcaca

SEQ ID NO: 1853 - RNA, 23 nt, Artificial Sequence
  Description of Artificial Sequence: Synthetic oligonucleotide
uaaggccaaaguguccaaauucc

SEQ ID NO: 1854 - RNA, 23 nt, Artificial Sequence
  Description of Artificial Sequence: Synthetic oligonucleotide
uaaggccaaaguguccaaauucc

SEQ ID NO: 1855 - RNA, 23 nt, Artificial Sequence
  Description of Artificial Sequence: Synthetic oligonucleotide
uuuccuggaaggccaaagugucc

SEQ ID NO: 1856 - DNA, 23 bp, Artificial Sequence
  Description of Artificial Sequence: Synthetic oligonucleotide
  Description of Combined DNA/RNA Molecule: Synthetic oligonucleotide
ucagtuccuggaaggccaaagug

SEQ ID NO: 1857 - RNA, 23 nt, Artificial Sequence
  Description of Artificial Sequence: Synthetic oligonucleotide
uuagcucggacuucaguuccugg

SEQ ID NO: 1858 - DNA, 23 bp, Artificial Sequence
  Description of Artificial Sequence: Synthetic oligonucleotide
  Description of Combined DNA/RNA Molecule: Synthetic oligonucleotide
uuagctcggacuucaguuccugg

SEQ ID NO: 1859 - RNA, 23 nt, Artificial Sequence
  Description of Artificial Sequence: Synthetic oligonucleotide
ucuucaguuagcucggacuucag

SEQ ID NO: 1860 - RNA, 23 nt, Artificial Sequence
  Description of Artificial Sequence: Synthetic oligonucleotide
uaagcaggaacuucaguuagcuc

SEQ ID NO: 1861 - RNA, 23 nt, Artificial Sequence
  Description of Artificial Sequence: Synthetic oligonucleotide
ugaagcaggaacuucaguuagcu

SEQ ID NO: 1862 - RNA, 23 nt, Artificial Sequence
  Description of Artificial Sequence: Synthetic oligonucleotide
uauucgggaagcaggaacuucag

SEQ ID NO: 1863 - DNA, 23 bp, Artificial Sequence
  Description of Artificial Sequence: Synthetic oligonucleotide
  Description of Combined DNA/RNA Molecule: Synthetic oligonucleotide
uucctacccaaacuaguucucca

SEQ ID NO: 1864 - RNA, 23 nt, Artificial Sequence
  Description of Artificial Sequence: Synthetic oligonucleotide
uuccuacccaaacuaguucucca

SEQ ID NO: 1865 - RNA, 23 nt, Artificial Sequence
  Description of Artificial Sequence: Synthetic oligonucleotide
ugcucuccuacccaaacuaguuc

SEQ ID NO: 1866 - DNA, 22 bp, Artificial Sequence
  Description of Artificial Sequence: Synthetic oligonucleotide
  Description of Combined DNA/RNA Molecule: Synthetic oligonucleotide
ugctctcuacccaaacuaguuc

SEQ ID NO: 1867 - RNA, 23 nt, Artificial Sequence
  Description of Artificial Sequence: Synthetic oligonucleotide
ucgugagaggcucuccuacccaa

SEQ ID NO: 1868 - RNA, 23 nt, Artificial Sequence
  Description of Artificial Sequence: Synthetic oligonucleotide
uagcgugagaggcucuccuaccc

SEQ ID NO: 1869 - RNA, 23 nt, Artificial Sequence
  Description of Artificial Sequence: Synthetic oligonucleotide
uagcgugagaggcucuccuaccc

SEQ ID NO: 1870 - DNA, 23 bp, Artificial Sequence
  Description of Artificial Sequence: Synthetic oligonucleotide
  Description of Combined DNA/RNA Molecule: Synthetic oligonucleotide
ucagcgtgagaggcucuccuacc

SEQ ID NO: 1871 - RNA, 23 nt, Artificial Sequence
  Description of Artificial Sequence: Synthetic oligonucleotide
uucagcgugagaggcucuccuac

SEQ ID NO: 1872 - DNA, 23 bp, Artificial Sequence
  Description of Artificial Sequence: Synthetic oligonucleotide
  Description of Combined DNA/RNA Molecule: Synthetic oligonucleotide
ucugtucucagcgugagaggcuc

SEQ ID NO: 1873 - DNA, 23 bp, Artificial Sequence
  Description of Artificial Sequence: Synthetic oligonucleotide
  Description of Combined DNA/RNA Molecule: Synthetic oligonucleotide
ucugutcucagcgugagaggcuc

SEQ ID NO: 1874 - DNA, 23 bp, Artificial Sequence
  Description of Artificial Sequence: Synthetic oligonucleotide
  Description of Combined DNA/RNA Molecule: Synthetic oligonucleotide
ucugutctcagcgugagaggcuc

SEQ ID NO: 1875 - RNA, 23 nt, Artificial Sequence
  Description of Artificial Sequence: Synthetic oligonucleotide
uuuucugcuguucucagcgugag

SEQ ID NO: 1876 - DNA, 23 bp, Artificial Sequence
  Description of Artificial Sequence: Synthetic oligonucleotide
  Description of Combined DNA/RNA Molecule: Synthetic oligonucleotide
uguutctgcuguucucagcguga

SEQ ID NO: 1877 - DNA, 23 bp, Artificial Sequence
  Description of Artificial Sequence: Synthetic oligonucleotide
  Description of Combined DNA/RNA Molecule: Synthetic oligonucleotide
uugutucugcuguucucagcgug

SEQ ID NO: 1878 - DNA, 23 bp, Artificial Sequence
  Description of Artificial Sequence: Synthetic oligonucleotide
  Description of Combined DNA/RNA Molecule: Synthetic oligonucleotide
uugtutcugcuguucucagcgug

SEQ ID NO: 1879 - DNA, 23 bp, Artificial Sequence
  Description of Artificial Sequence: Synthetic oligonucleotide
  Description of Combined DNA/RNA Molecule: Synthetic oligonucleotide
uuugtutcugcuguucucagcgu

SEQ ID NO: 1880 - DNA, 23 bp, Artificial Sequence
  Description of Artificial Sequence: Synthetic oligonucleotide
  Description of Combined DNA/RNA Molecule: Synthetic oligonucleotide
uauugutucugcuguucucagcg

SEQ ID NO: 1881 - DNA, 23 bp, Artificial Sequence
  Description of Artificial Sequence: Synthetic oligonucleotide
  Description of Combined DNA/RNA Molecule: Synthetic oligonucleotide
uaautgtuucugcuguucucagc

SEQ ID NO: 1882 - DNA, 23 bp, Artificial Sequence
  Description of Artificial Sequence: Synthetic oligonucleotide
  Description of Combined DNA/RNA Molecule: Synthetic oligonucleotide
uuaatuguuucugcuguucucag

SEQ ID NO: 1883 - DNA, 23 bp, Artificial Sequence
  Description of Artificial Sequence: Synthetic oligonucleotide
  Description of Combined DNA/RNA Molecule: Synthetic oligonucleotide
uguaautguuucugcuguucuca

SEQ ID NO: 1884 - DNA, 23 bp, Artificial Sequence
  Description of Artificial Sequence: Synthetic oligonucleotide
  Description of Combined DNA/RNA Molecule: Synthetic oligonucleotide
uguaautguuucugcuguucuca

SEQ ID NO: 1885 - DNA, 23 bp, Artificial Sequence
  Description of Artificial Sequence: Synthetic oligonucleotide
  Description of Combined DNA/RNA Molecule: Synthetic oligonucleotide
uaguaatuguutcugcuguucuc

SEQ ID NO: 1886 - DNA, 23 bp, Artificial Sequence
  Description of Artificial Sequence: Synthetic oligonucleotide
  Description of Combined DNA/RNA Molecule: Synthetic oligonucleotide
ucagtaauuguuucugcuguucu

SEQ ID NO: 1887 - DNA, 23 bp, Artificial Sequence
  Description of Artificial Sequence: Synthetic oligonucleotide
  Description of Combined DNA/RNA Molecule: Synthetic oligonucleotide
ucagtaauuguuucugcuguucu

SEQ ID NO: 1888 - DNA, 23 bp, Artificial Sequence
  Description of Artificial Sequence: Synthetic oligonucleotide
  Description of Combined DNA/RNA Molecule: Synthetic oligonucleotide
ucagtaauugutucugguguucu

SEQ ID NO: 1889 - DNA, 23 bp, Artificial Sequence
  Description of Artificial Sequence: Synthetic oligonucleotide
  Description of Combined DNA/RNA Molecule: Synthetic oligonucleotide
ucagtaauugutucugcaguucu

SEQ ID NO: 1890 - DNA, 23 bp, Artificial Sequence
  Description of Artificial Sequence: Synthetic oligonucleotide
  Description of Combined DNA/RNA Molecule: Synthetic oligonucleotide
ucagtaauugutucugcucuucu

SEQ ID NO: 1891 - RNA, 23 nt, Artificial Sequence
  Description of Artificial Sequence: Synthetic oligonucleotide
ucaguaauuguuucugcuguucu

SEQ ID NO: 1892 - DNA, 23 bp, Artificial Sequence
  Description of Artificial Sequence: Synthetic oligonucleotide
  Description of Combined DNA/RNA Molecule: Synthetic oligonucleotide
ucagtaauugutucugcuguucu

SEQ ID NO: 1893 - DNA, 23 bp, Artificial Sequence
  Description of Artificial Sequence: Synthetic oligonucleotide
  Description of Combined DNA/RNA Molecule: Synthetic oligonucleotide
ucagtaauugutucugcuguucu

SEQ ID NO: 1894 - DNA, 23 bp, Artificial Sequence
  Description of Artificial Sequence: Synthetic oligonucleotide
  Description of Combined DNA/RNA Molecule: Synthetic oligonucleotide
uccaguaauugtuucugcuguuc

SEQ ID NO: 1895 - DNA, 21 bp, Artificial Sequence
  Description of Artificial Sequence: Synthetic oligonucleotide
  Description of Combined DNA/RNA Molecule: Synthetic oligonucleotide
ucagtaauugutucugcuguu

SEQ ID NO: 1896 - DNA, 23 bp, Artificial Sequence
  Description of Artificial Sequence: Synthetic oligonucleotide
  Description of Combined DNA/RNA Molecule: Synthetic oligonucleotide
ugccagtaauuguuucugcuguu

SEQ ID NO: 1897 - RNA, 23 nt, Artificial Sequence
  Description of Artificial Sequence: Synthetic oligonucleotide
uugccaguaauuguuucugcugu

SEQ ID NO: 1898 - RNA, 23 nt, Artificial Sequence
  Description of Artificial Sequence: Synthetic oligonucleotide
uuugccaguaauuguuucugcug

SEQ ID NO: 1899 - RNA, 23 nt, Artificial Sequence
  Description of Artificial Sequence: Synthetic oligonucleotide
ucuugccaguaauuguuucugcu

SEQ ID NO: 1900 - RNA, 23 nt, Artificial Sequence
  Description of Artificial Sequence: Synthetic oligonucleotide
ucuugccaguaauuguuucugcu

SEQ ID NO: 1901 - DNA, 23 bp, Artificial Sequence
  Description of Artificial Sequence: Synthetic oligonucleotide
  Description of Combined DNA/RNA Molecule: Synthetic oligonucleotide
uacutgacaguaauuguuucugc

SEQ ID NO: 1902 - DNA, 23 bp, Artificial Sequence
  Description of Artificial Sequence: Synthetic oligonucleotide
  Description of Combined DNA/RNA Molecule: Synthetic oligonucleotide
uuactugccaguaauuguuucug

SEQ ID NO: 1903 - DNA, 23 bp, Artificial Sequence
  Description of Artificial Sequence: Synthetic oligonucleotide
  Description of Combined DNA/RNA Molecule: Synthetic oligonucleotide
uauacutgccaguaauuguuucu

SEQ ID NO: 1904 - DNA, 23 bp, Artificial Sequence
  Description of Artificial Sequence: Synthetic oligonucleotide
  Description of Combined DNA/RNA Molecule: Synthetic oligonucleotide
ucauactugccaguaauuguuuc

SEQ ID NO: 1905 - DNA, 23 bp, Artificial Sequence
  Description of Artificial Sequence: Synthetic oligonucleotide
  Description of Combined DNA/RNA Molecule: Synthetic oligonucleotide
ucauactugccaguaauuguuuc

SEQ ID NO: 1906 - RNA, 23 nt, Artificial Sequence
  Description of Artificial Sequence: Synthetic oligonucleotide
uauccacacaccauacuugccag

SEQ ID NO: 1907 - RNA, 23 nt, Artificial Sequence
  Description of Artificial Sequence: Synthetic oligonucleotide
uauccacacaccauacuugccag

SEQ ID NO: 1908 - RNA, 23 nt, Artificial Sequence
  Description of Artificial Sequence: Synthetic oligonucleotide
uauccacacaccauacuugccag

SEQ ID NO: 1909 - DNA, 23 bp, Artificial Sequence
  Description of Artificial Sequence: Synthetic oligonucleotide
  Description of Combined DNA/RNA Molecule: Synthetic oligonucleotide
ugcatccacacaccauacuugcc

SEQ ID NO: 1910 - RNA, 23 nt, Artificial Sequence
  Description of Artificial Sequence: Synthetic oligonucleotide
ugcauccacacaccauacuugcc

SEQ ID NO: 1911 - DNA, 23 bp, Artificial Sequence
  Description of Artificial Sequence: Synthetic oligonucleotide
  Description of Combined DNA/RNA Molecule: Synthetic oligonucleotide
uggctgaugaggucauacucaaa

SEQ ID NO: 1912 - RNA, 23 nt, Artificial Sequence
  Description of Artificial Sequence: Synthetic oligonucleotide
uuggcugaugaggucauacucaa

SEQ ID NO: 1913 - DNA, 23 bp, Artificial Sequence
  Description of Artificial Sequence: Synthetic oligonucleotide
  Description of Combined DNA/RNA Molecule: Synthetic oligonucleotide
ucuggctgaugaggucauacuca

SEQ ID NO: 1914 - RNA, 23 nt, Artificial Sequence
  Description of Artificial Sequence: Synthetic oligonucleotide
uacuggcugaugaggucauacuc

SEQ ID NO: 1915 - DNA, 23 bp, Artificial Sequence
  Description of Artificial Sequence: Synthetic oligonucleotide
  Description of Combined DNA/RNA Molecule: Synthetic oligonucleotide
uacuggctgaugaggucauacuc

SEQ ID NO: 1916 - DNA, 23 bp, Artificial Sequence
  Description of Artificial Sequence: Synthetic oligonucleotide
  Description of Combined DNA/RNA Molecule: Synthetic oligonucleotide
uaactggcugaugaggucauacu

SEQ ID NO: 1917 - RNA, 23 nt, Artificial Sequence
  Description of Artificial Sequence: Synthetic oligonucleotide
uaaacuggcugaugaggucauac

SEQ ID NO: 1918 - DNA, 23 bp, Artificial Sequence
  Description of Artificial Sequence: Synthetic oligonucleotide
  Description of Combined DNA/RNA Molecule: Synthetic oligonucleotide
uuaaactggcugaugaggucaua

SEQ ID NO: 1919 - DNA, 23 bp, Artificial Sequence
  Description of Artificial Sequence: Synthetic oligonucleotide
  Description of Combined DNA/RNA Molecule: Synthetic oligonucleotide
uauaaacuggctgaugaggucau

SEQ ID NO: 1920 - RNA, 23 nt, Artificial Sequence
  Description of Artificial Sequence: Synthetic oligonucleotide
ucauaaacuggcugaugagguca

SEQ ID NO: 1921 - RNA, 23 nt, Artificial Sequence
  Description of Artificial Sequence: Synthetic oligonucleotide
ugcauaaacuggcugaugagguc

SEQ ID NO: 1922 - DNA, 23 bp, Artificial Sequence
  Description of Artificial Sequence: Synthetic oligonucleotide
  Description of Combined DNA/RNA Molecule: Synthetic oligonucleotide
ugcataaacuggcugaugagguc

SEQ ID NO: 1923 - DNA, 23 bp, Artificial Sequence
  Description of Artificial Sequence: Synthetic oligonucleotide
  Description of Combined DNA/RNA Molecule: Synthetic oligonucleotide
ugcataaacuggcugaugagguc

SEQ ID NO: 1924 - DNA, 23 bp, Artificial Sequence
  Description of Artificial Sequence: Synthetic oligonucleotide
  Description of Combined DNA/RNA Molecule: Synthetic oligonucleotide
ugcataaacuggcugaugagguc

SEQ ID NO: 1925 - DNA, 23 bp, Artificial Sequence
  Description of Artificial Sequence: Synthetic oligonucleotide
  Description of Combined DNA/RNA Molecule: Synthetic oligonucleotide
ugcataaacuggcugaugagguc

SEQ ID NO: 1926 - DNA, 23 bp, Artificial Sequence
  Description of Artificial Sequence: Synthetic oligonucleotide
  Description of Combined DNA/RNA Molecule: Synthetic oligonucleotide
ugcataaacuggcugaugagguc

SEQ ID NO: 1927 - DNA, 23 bp, Artificial Sequence
  Description of Artificial Sequence: Synthetic oligonucleotide
  Description of Combined DNA/RNA Molecule: Synthetic oligonucleotide
ugcataaacuggcugaugagguc

SEQ ID NO: 1928 - DNA, 23 bp, Artificial Sequence
  Description of Artificial Sequence: Synthetic oligonucleotide
  Description of Combined DNA/RNA Molecule: Synthetic oligonucleotide
ugcataaacuggcugaagagguc

SEQ ID NO: 1929 - DNA, 23 bp, Artificial Sequence
  Description of Artificial Sequence: Synthetic oligonucleotide
  Description of Combined DNA/RNA Molecule: Synthetic oligonucleotide
ugcataaacuggcugaucagguc

SEQ ID NO: 1930 - DNA, 23 bp, Artificial Sequence
  Description of Artificial Sequence: Synthetic oligonucleotide
  Description of Combined DNA/RNA Molecule: Synthetic oligonucleotide
ugcataaacuggcugaugugguc

SEQ ID NO: 1931 - DNA, 23 bp, Artificial Sequence
  Description of Artificial Sequence: Synthetic oligonucleotide
  Description of Combined DNA/RNA Molecule: Synthetic oligonucleotide
ugcataaacuggcugaugagguc

SEQ ID NO: 1932 - DNA, 23 bp, Artificial Sequence
  Description of Artificial Sequence: Synthetic oligonucleotide
  Description of Combined DNA/RNA Molecule: Synthetic oligonucleotide
utgcauaaacuggcugaugaggu

SEQ ID NO: 1933 - DNA, 21 bp, Artificial Sequence
  Description of Artificial Sequence: Synthetic oligonucleotide
  Description of Combined DNA/RNA Molecule: Synthetic oligonucleotide
ugcataaacuggcugaugagg

SEQ ID NO: 1934 - DNA, 23 bp, Artificial Sequence
  Description of Artificial Sequence: Synthetic oligonucleotide
  Description of Combined DNA/RNA Molecule: Synthetic oligonucleotide
ucugcataaacuggcugaugagg

SEQ ID NO: 1935 - DNA, 23 bp, Artificial Sequence
  Description of Artificial Sequence: Synthetic oligonucleotide
  Description of Combined DNA/RNA Molecule: Synthetic oligonucleotide
ucugcataaactggcugaugagg

SEQ ID NO: 1936 - RNA, 23 nt, Artificial Sequence
  Description of Artificial Sequence: Synthetic oligonucleotide
uccugcauaaacuggcugaugag

SEQ ID NO: 1937 - DNA, 23 bp, Artificial Sequence
  Description of Artificial Sequence: Synthetic oligonucleotide
  Description of Combined DNA/RNA Molecule: Synthetic oligonucleotide
uccctgcauaaacuggcugauga

SEQ ID NO: 1938 - RNA, 23 nt, Artificial Sequence
  Description of Artificial Sequence: Synthetic oligonucleotide
ucccugcauaaacuggcugauga

SEQ ID NO: 1939 - RNA, 23 nt, Artificial Sequence
  Description of Artificial Sequence: Synthetic oligonucleotide
ugcccugcauaaacuggcugaug

SEQ ID NO: 1940 - DNA, 23 bp, Artificial Sequence
  Description of Artificial Sequence: Synthetic oligonucleotide
  Description of Combined DNA/RNA Molecule: Synthetic oligonucleotide
uagccctgcauaaacuggcugau

SEQ ID NO: 1941 - RNA, 23 nt, Artificial Sequence
  Description of Artificial Sequence: Synthetic oligonucleotide
uuagcccugcauaaacuggcuga

SEQ ID NO: 1942 - DNA, 23 bp, Artificial Sequence
  Description of Artificial Sequence: Synthetic oligonucleotide
  Description of Combined DNA/RNA Molecule: Synthetic oligonucleotide
uuagccctgcauaaacuggcuga

SEQ ID NO: 1943 - RNA, 23 nt, Artificial Sequence
  Description of Artificial Sequence: Synthetic oligonucleotide
uguagcccugcauaaacuggcug

SEQ ID NO: 1944 - RNA, 23 nt, Artificial Sequence
  Description of Artificial Sequence: Synthetic oligonucleotide
uguagcacugcauaaacuggcug

SEQ ID NO: 1945 - RNA, 23 nt, Artificial Sequence
  Description of Artificial Sequence: Synthetic oligonucleotide
ugguagcccugcauaaacuggcu

SEQ ID NO: 1946 - RNA, 23 nt, Artificial Sequence
  Description of Artificial Sequence: Synthetic oligonucleotide
ugguagaccugcauaaacuggcu

SEQ ID NO: 1947 - DNA, 23 bp, Artificial Sequence
  Description of Artificial Sequence: Synthetic oligonucleotide
  Description of Combined DNA/RNA Molecule: Synthetic oligonucleotide
ucuuagaagggtagcccugcaua

SEQ ID NO: 1948 - DNA, 23 bp, Artificial Sequence
  Description of Artificial Sequence: Synthetic oligonucleotide
  Description of Combined DNA/RNA Molecule: Synthetic oligonucleotide
uccgagtacaccacagcacccgu

SEQ ID NO: 1949 - DNA, 23 bp, Artificial Sequence
  Description of Artificial Sequence: Synthetic oligonucleotide
  Description of Combined DNA/RNA Molecule: Synthetic oligonucleotide
uccgagtacaccacagcacccgu

SEQ ID NO: 1950 - DNA, 23 bp, Artificial Sequence
  Description of Artificial Sequence: Synthetic oligonucleotide
  Description of Combined DNA/RNA Molecule: Synthetic oligonucleotide
ucgccctggaaauagaggcuccc

SEQ ID NO: 1951 - DNA, 23 bp, Artificial Sequence
  Description of Artificial Sequence: Synthetic oligonucleotide
  Description of Combined DNA/RNA Molecule: Synthetic oligonucleotide
ucgccctggaaauagaggcuccc

SEQ ID NO: 1952 - RNA, 23 nt, Artificial Sequence
  Description of Artificial Sequence: Synthetic oligonucleotide
ucagcgcccuggaaauagaggcu

SEQ ID NO: 1953 - RNA, 23 nt, Artificial Sequence
  Description of Artificial Sequence: Synthetic oligonucleotide
ucuggacucagcgcccuggaaau

SEQ ID NO: 1954 - RNA, 23 nt, Artificial Sequence
  Description of Artificial Sequence: Synthetic oligonucleotide
ucuggacucagcgcccuggaaau

SEQ ID NO: 1955 - DNA, 23 bp, Artificial Sequence
  Description of Artificial Sequence: Synthetic oligonucleotide
  Description of Combined DNA/RNA Molecule: Synthetic oligonucleotide
ucuggactcagcgcccuggaaau

SEQ ID NO: 1956 - DNA, 23 bp, Artificial Sequence
  Description of Artificial Sequence: Synthetic oligonucleotide
  Description of Combined DNA/RNA Molecule: Synthetic oligonucleotide
uagutctggacucagcgcccugg

SEQ ID NO: 1957 - DNA, 23 bp, Artificial Sequence
  Description of Artificial Sequence: Synthetic oligonucleotide
  Description of Combined DNA/RNA Molecule: Synthetic oligonucleotide
ucagtucuggacucagcgcccug

SEQ ID NO: 1958 - DNA, 23 bp, Artificial Sequence
  Description of Artificial Sequence: Synthetic oligonucleotide
  Description of Combined DNA/RNA Molecule: Synthetic oligonucleotide
ucagutcuggacucagcgcccug

SEQ ID NO: 1959 - DNA, 23 bp, Artificial Sequence
  Description of Artificial Sequence: Synthetic oligonucleotide
  Description of Combined DNA/RNA Molecule: Synthetic oligonucleotide
ucagtucuggacucagcgcccug

SEQ ID NO: 1960 - DNA, 23 bp, Artificial Sequence
  Description of Artificial Sequence: Synthetic oligonucleotide
  Description of Combined DNA/RNA Molecule: Synthetic oligonucleotide
uacagutcuggacucagcgcccu

SEQ ID NO: 1961 - DNA, 23 bp, Artificial Sequence
  Description of Artificial Sequence: Synthetic oligonucleotide
  Description of Combined DNA/RNA Molecule: Synthetic oligonucleotide
ugacagtucuggacucagcgccc

SEQ ID NO: 1962 - RNA, 23 nt, Artificial Sequence
  Description of Artificial Sequence: Synthetic oligonucleotide
uugacaguucuggacucagcgcc

SEQ ID NO: 1963 - RNA, 23 nt, Artificial Sequence
  Description of Artificial Sequence: Synthetic oligonucleotide
uaugacaguucuggacucagcgc

SEQ ID NO: 1964 - RNA, 23 nt, Artificial Sequence
  Description of Artificial Sequence: Synthetic oligonucleotide
uuaugacaguucuggacucagcg

SEQ ID NO: 1965 - DNA, 23 bp, Artificial Sequence
  Description of Artificial Sequence: Synthetic oligonucleotide
  Description of Combined DNA/RNA Molecule: Synthetic oligonucleotide
uuatgacaguucuggacucagcg

SEQ ID NO: 1966 - RNA, 23 nt, Artificial Sequence
  Description of Artificial Sequence: Synthetic oligonucleotide
uuaugacaguucuggacucagcg

SEQ ID NO: 1967 - DNA, 23 bp, Artificial Sequence
  Description of Artificial Sequence: Synthetic oligonucleotide
  Description of Combined DNA/RNA Molecule: Synthetic oligonucleotide
uuuatgacaguucuggacucagc

SEQ ID NO: 1968 - RNA, 23 nt, Artificial Sequence
  Description of Artificial Sequence: Synthetic oligonucleotide
ucuuaugacaguucuggacucag

SEQ ID NO: 1969 - DNA, 23 bp, Artificial Sequence
  Description of Artificial Sequence: Synthetic oligonucleotide
  Description of Combined DNA/RNA Molecule: Synthetic oligonucleotide
ucuuaugacagtucuggacucag

SEQ ID NO: 1970 - DNA, 23 bp, Artificial Sequence
  Description of Artificial Sequence: Synthetic oligonucleotide
  Description of Combined DNA/RNA Molecule: Synthetic oligonucleotide
uucutatgacaguucuggacuca

SEQ ID NO: 1971 - DNA, 23 bp, Artificial Sequence
  Description of Artificial Sequence: Synthetic oligonucleotide
  Description of Combined DNA/RNA Molecule: Synthetic oligonucleotide
utcutatgacaguucuggacuca

SEQ ID NO: 1972 - RNA, 23 nt, Artificial Sequence
  Description of Artificial Sequence: Synthetic oligonucleotide
uaucuuaugacaguucuggacuc

SEQ ID NO: 1973 - DNA, 23 bp, Artificial Sequence
  Description of Artificial Sequence: Synthetic oligonucleotide
  Description of Combined DNA/RNA Molecule: Synthetic oligonucleotide
uauctuaugacaguucuggacuc

SEQ ID NO: 1974 - DNA, 23 bp, Artificial Sequence
  Description of Artificial Sequence: Synthetic oligonucleotide
  Description of Combined DNA/RNA Molecule: Synthetic oligonucleotide
uauctuaugacaguucuggacuc

SEQ ID NO: 1975 - DNA, 23 bp, Artificial Sequence
  Description of Artificial Sequence: Synthetic oligonucleotide
  Description of Combined DNA/RNA Molecule: Synthetic oligonucleotide
uauctuaugacaguucuggacuc

SEQ ID NO: 1976 - DNA, 23 bp, Artificial Sequence
  Description of Artificial Sequence: Synthetic oligonucleotide
  Description of Combined DNA/RNA Molecule: Synthetic oligonucleotide
uauctuaugacaguucuggacuc

SEQ ID NO: 1977 - DNA, 23 bp, Artificial Sequence
  Description of Artificial Sequence: Synthetic oligonucleotide
  Description of Combined DNA/RNA Molecule: Synthetic oligonucleotide
uauctuaugacaguucaggacuc

SEQ ID NO: 1978 - DNA, 23 bp, Artificial Sequence
  Description of Artificial Sequence: Synthetic oligonucleotide
  Description of Combined DNA/RNA Molecule: Synthetic oligonucleotide
uauctuaugacaguucucgacuc

SEQ ID NO: 1979 - DNA, 23 bp, Artificial Sequence
  Description of Artificial Sequence: Synthetic oligonucleotide
  Description of Combined DNA/RNA Molecule: Synthetic oligonucleotide
uauctuaugacaguucuggacuc

SEQ ID NO: 1980 - DNA, 23 bp, Artificial Sequence
  Description of Artificial Sequence: Synthetic oligonucleotide
  Description of Combined DNA/RNA Molecule: Synthetic oligonucleotide
uauctuaugacaguucuggacuc

SEQ ID NO: 1981 - DNA, 23 bp, Artificial Sequence
  Description of Artificial Sequence: Synthetic oligonucleotide
  Description of Combined DNA/RNA Molecule: Synthetic oligonucleotide
uauctuaugacaguucuggacuc

SEQ ID NO: 1982 - DNA, 23 bp, Artificial Sequence
  Description of Artificial Sequence: Synthetic oligonucleotide
  Description of Combined DNA/RNA Molecule: Synthetic oligonucleotide
uuaucutaugacaguucuggacu

SEQ ID NO: 1983 - DNA, 21 bp, Artificial Sequence
  Description of Artificial Sequence: Synthetic oligonucleotide
  Description of Combined DNA/RNA Molecule: Synthetic oligonucleotide
uauctuaugacaguucugggc

SEQ ID NO: 1984 - DNA, 23 bp, Artificial Sequence
  Description of Artificial Sequence: Synthetic oligonucleotide
  Description of Combined DNA/RNA Molecule: Synthetic oligonucleotide
uauatctuaugacaguucuggac

SEQ ID NO: 1985 - RNA, 23 nt, Artificial Sequence
  Description of Artificial Sequence: Synthetic oligonucleotide
ucauaucuuaugacaguucugga

SEQ ID NO: 1986 - DNA, 23 bp, Artificial Sequence
  Description of Artificial Sequence: Synthetic oligonucleotide
  Description of Combined DNA/RNA Molecule: Synthetic oligonucleotide
ucatatcuuaugacaguucugga

SEQ ID NO: 1987 - RNA, 23 nt, Artificial Sequence
  Description of Artificial Sequence: Synthetic oligonucleotide
ucauaucuuaugacaguucugga

SEQ ID NO: 1988 - DNA, 23 bp, Artificial Sequence
  Description of Artificial Sequence: Synthetic oligonucleotide
  Description of Combined DNA/RNA Molecule: Synthetic oligonucleotide
uucatatcuuaugacaguucugg

SEQ ID NO: 1989 - DNA, 23 bp, Artificial Sequence
  Description of Artificial Sequence: Synthetic oligonucleotide
  Description of Combined DNA/RNA Molecule: Synthetic oligonucleotide
utcatatcuuatgacaguucugg

SEQ ID NO: 1990 - RNA, 23 nt, Artificial Sequence
  Description of Artificial Sequence: Synthetic oligonucleotide
ucucauaucuuaugacaguucug

SEQ ID NO: 1991 - DNA, 23 bp, Artificial Sequence
  Description of Artificial Sequence: Synthetic oligonucleotide
  Description of Combined DNA/RNA Molecule: Synthetic oligonucleotide
ugcucataucuuaugacaguucu

SEQ ID NO: 1992 - DNA, 23 bp, Artificial Sequence
  Description of Artificial Sequence: Synthetic oligonucleotide
  Description of Combined DNA/RNA Molecule: Synthetic oligonucleotide
uagctcauaucuuaugacaguuc

SEQ ID NO: 1993 - RNA, 23 nt, Artificial Sequence
  Description of Artificial Sequence: Synthetic oligonucleotide
ucagcucauaucuuaugacaguu

SEQ ID NO: 1994 - DNA, 23 bp, Artificial Sequence
  Description of Artificial Sequence: Synthetic oligonucleotide
  Description of Combined DNA/RNA Molecule: Synthetic oligonucleotide
ucagctcauaucuuaugacaguu

SEQ ID NO: 1995 - DNA, 23 bp, Artificial Sequence
  Description of Artificial Sequence: Synthetic oligonucleotide
  Description of Combined DNA/RNA Molecule: Synthetic oligonucleotide
ucagctcauaucuuaugacaguu

SEQ ID NO: 1996 - DNA, 23 bp, Artificial Sequence
  Description of Artificial Sequence: Synthetic oligonucleotide
  Description of Combined DNA/RNA Molecule: Synthetic oligonucleotide
uucagctcauaucuuaugacagu

SEQ ID NO: 1997 - DNA, 23 bp, Artificial Sequence
  Description of Artificial Sequence: Synthetic oligonucleotide
  Description of Combined DNA/RNA Molecule: Synthetic oligonucleotide
uuautcagcucauaucuuaugac

SEQ ID NO: 1998 - DNA, 23 bp, Artificial Sequence
  Description of Artificial Sequence: Synthetic oligonucleotide
  Description of Combined DNA/RNA Molecule: Synthetic oligonucleotide
uuucactgucucgguauucagcu

SEQ ID NO: 1999 - DNA, 23 bp, Artificial Sequence
  Description of Artificial Sequence: Synthetic oligonucleotide
  Description of Combined DNA/RNA Molecule: Synthetic oligonucleotide
ucagcctucacugucucgguauu

SEQ ID NO: 2000 - DNA, 23 bp, Artificial Sequence
  Description of Artificial Sequence: Synthetic oligonucleotide
  Description of Combined DNA/RNA Molecule: Synthetic oligonucleotide
ucagcctucactgucucgguauu

SEQ ID NO: 2001 - DNA, 23 bp, Artificial Sequence
  Description of Artificial Sequence: Synthetic oligonucleotide
  Description of Combined DNA/RNA Molecule: Synthetic oligonucleotide
uucctucucagccuucacugucu

SEQ ID NO: 2002 - DNA, 23 bp, Artificial Sequence
  Description of Artificial Sequence: Synthetic oligonucleotide
  Description of Combined DNA/RNA Molecule: Synthetic oligonucleotide
uuccutcucagccuucacugucu

SEQ ID NO: 2003 - DNA, 23 bp, Artificial Sequence
  Description of Artificial Sequence: Synthetic oligonucleotide
  Description of Combined DNA/RNA Molecule: Synthetic oligonucleotide
uuccutctcagccuucacugucu

SEQ ID NO: 2004 - RNA, 23 nt, Artificial Sequence
  Description of Artificial Sequence: Synthetic oligonucleotide
ucuccagggauuuccuucucagc

SEQ ID NO: 2005 - RNA, 23 nt, Artificial Sequence
  Description of Artificial Sequence: Synthetic oligonucleotide
uaggacaauggcaccuuuggccu

SEQ ID NO: 2006 - RNA, 23 nt, Artificial Sequence
  Description of Artificial Sequence: Synthetic oligonucleotide
uauucucuggguucaguuuggag

SEQ ID NO: 2007 - DNA, 23 bp, Artificial Sequence
  Description of Artificial Sequence: Synthetic oligonucleotide
  Description of Combined DNA/RNA Molecule: Synthetic oligonucleotide
uautctcuggguucaguuuggag

SEQ ID NO: 2008 - DNA, 23 bp, Artificial Sequence
  Description of Artificial Sequence: Synthetic oligonucleotide
  Description of Combined DNA/RNA Molecule: Synthetic oligonucleotide
uauuctctggguucaguuuggag

SEQ ID NO: 2009 - DNA, 23 bp, Artificial Sequence
  Description of Artificial Sequence: Synthetic oligonucleotide
  Description of Combined DNA/RNA Molecule: Synthetic oligonucleotide
ugautctcuggguucaguuugga

SEQ ID NO: 2010 - RNA, 23 nt, Artificial Sequence
  Description of Artificial Sequence: Synthetic oligonucleotide
uggcgacugacugcuuacggaug

SEQ ID NO: 2011 - RNA, 23 nt, Artificial Sequence
  Description of Artificial Sequence: Synthetic oligonucleotide
uggcgacugacugcuuacggaug

SEQ ID NO: 2012 - DNA, 23 bp, Artificial Sequence
  Description of Artificial Sequence: Synthetic oligonucleotide
  Description of Combined DNA/RNA Molecule: Synthetic oligonucleotide
uggcgactgacugcuuacggaug

SEQ ID NO: 2013 - DNA, 23 bp, Artificial Sequence
  Description of Artificial Sequence: Synthetic oligonucleotide
  Description of Combined DNA/RNA Molecule: Synthetic oligonucleotide
uggcgacugactgcuuacggaug

SEQ ID NO: 2014 - DNA, 23 bp, Artificial Sequence
  Description of Artificial Sequence: Synthetic oligonucleotide
  Description of Combined DNA/RNA Molecule: Synthetic oligonucleotide
ucautggcgacugacugcuuacg

SEQ ID NO: 2015 - RNA, 23 nt, Artificial Sequence
  Description of Artificial Sequence: Synthetic oligonucleotide
uaaggcauuggcgacugacugcu

SEQ ID NO: 2016 - RNA, 23 nt, Artificial Sequence
  Description of Artificial Sequence: Synthetic oligonucleotide
uaugaaggcauuggcgacugacu

SEQ ID NO: 2017 - DNA, 23 bp, Artificial Sequence
  Description of Artificial Sequence: Synthetic oligonucleotide
  Description of Combined DNA/RNA Molecule: Synthetic oligonucleotide
uugatgaaggcauuggcgacuga

SEQ ID NO: 2018 - RNA, 23 nt, Artificial Sequence
  Description of Artificial Sequence: Synthetic oligonucleotide
ucagaugaugaaggcauuggcga

SEQ ID NO: 2019 - RNA, 23 nt, Artificial Sequence
  Description of Artificial Sequence: Synthetic oligonucleotide
uggugccacagaugaugaaggca

SEQ ID NO: 2020 - RNA, 23 nt, Artificial Sequence
  Description of Artificial Sequence: Synthetic oligonucleotide
uggugccacagaugaugaaggca

SEQ ID NO: 2021 - DNA, 23 bp, Artificial Sequence
  Description of Artificial Sequence: Synthetic oligonucleotide
  Description of Combined DNA/RNA Molecule: Synthetic oligonucleotide
ucggtgtacaaggugccacagau

SEQ ID NO: 2022 - RNA, 23 nt, Artificial Sequence
  Description of Artificial Sequence: Synthetic oligonucleotide
uauaagcaaaguugacgguagca

SEQ ID NO: 2023 - RNA, 23 nt, Artificial Sequence
  Description of Artificial Sequence: Synthetic oligonucleotide
uauaagcaaaguugacgguagca

SEQ ID NO: 2024 - RNA, 23 nt, Artificial Sequence
  Description of Artificial Sequence: Synthetic oligonucleotide
ucauaagcaaaguugacgguagc

SEQ ID NO: 2025 - RNA, 23 nt, Artificial Sequence
  Description of Artificial Sequence: Synthetic oligonucleotide
ucauaagcaaaguugacgguagc

SEQ ID NO: 2026 - RNA, 23 nt, Artificial Sequence
  Description of Artificial Sequence: Synthetic oligonucleotide
ucauaagcaaaguugacgguagc

SEQ ID NO: 2027 - DNA, 23 bp, Artificial Sequence
  Description of Artificial Sequence: Synthetic oligonucleotide
  Description of Combined DNA/RNA Molecule: Synthetic oligonucleotide
ucataagcaaaguugacgguagc

SEQ ID NO: 2028 - RNA, 23 nt, Artificial Sequence
  Description of Artificial Sequence: Synthetic oligonucleotide
ucauaagcaaaguugacgguagc

SEQ ID NO: 2029 - RNA, 23 nt, Artificial Sequence
  Description of Artificial Sequence: Synthetic oligonucleotide
ucauaagcaaaguugaggguagc

SEQ ID NO: 2030 - RNA, 23 nt, Artificial Sequence
  Description of Artificial Sequence: Synthetic oligonucleotide
ucauaagcaaaguugaccguagc

SEQ ID NO: 2031 - RNA, 23 nt, Artificial Sequence
  Description of Artificial Sequence: Synthetic oligonucleotide
ucauaagcaaaguugacgcuagc

SEQ ID NO: 2032 - RNA, 23 nt, Artificial Sequence
  Description of Artificial Sequence: Synthetic oligonucleotide
ucauaagcaaaguugacgguagc

SEQ ID NO: 2033 - RNA, 23 nt, Artificial Sequence
  Description of Artificial Sequence: Synthetic oligonucleotide
ucauaagcaaaguugacgguagc

SEQ ID NO: 2034 - DNA, 23 bp, Artificial Sequence
  Description of Artificial Sequence: Synthetic oligonucleotide
  Description of Combined DNA/RNA Molecule: Synthetic oligonucleotide
uucataagcaaaguugacgguag

SEQ ID NO: 2035 - DNA, 23 bp, Artificial Sequence
  Description of Artificial Sequence: Synthetic oligonucleotide
  Description of Combined DNA/RNA Molecule: Synthetic oligonucleotide
utcataagcaaaguugacgguag

SEQ ID NO: 2036 - RNA, 21 nt, Artificial Sequence
  Description of Artificial Sequence: Synthetic oligonucleotide
ucauaagcaaaguugacggug

SEQ ID NO: 2037 - RNA, 23 nt, Artificial Sequence
  Description of Artificial Sequence: Synthetic oligonucleotide
ugucauaagcaaaguugacggua

SEQ ID NO: 2038 - DNA, 23 bp, Artificial Sequence
  Description of Artificial Sequence: Synthetic oligonucleotide
  Description of Combined DNA/RNA Molecule: Synthetic oligonucleotide
uugucataagcaaaguugacggu

SEQ ID NO: 2039 - DNA, 23 bp, Artificial Sequence
  Description of Artificial Sequence: Synthetic oligonucleotide
  Description of Combined DNA/RNA Molecule: Synthetic oligonucleotide
ugugtcauaagcaaaguugacgg

SEQ ID NO: 2040 - RNA, 23 nt, Artificial Sequence
  Description of Artificial Sequence: Synthetic oligonucleotide
uugugucauaagcaaaguugacg

SEQ ID NO: 2041 - DNA, 23 bp, Artificial Sequence
  Description of Artificial Sequence: Synthetic oligonucleotide
  Description of Combined DNA/RNA Molecule: Synthetic oligonucleotide
uugtgtcauaagcaaaguugacg

SEQ ID NO: 2042 - DNA, 23 bp, Artificial Sequence
  Description of Artificial Sequence: Synthetic oligonucleotide
  Description of Combined DNA/RNA Molecule: Synthetic oligonucleotide
ucugtgtcauaagcaaaguugac

SEQ ID NO: 2043 - RNA, 23 nt, Artificial Sequence
  Description of Artificial Sequence: Synthetic oligonucleotide
uccugugucauaagcaaaguuga

SEQ ID NO: 2044 - DNA, 23 bp, Artificial Sequence
  Description of Artificial Sequence: Synthetic oligonucleotide
  Description of Combined DNA/RNA Molecule: Synthetic oligonucleotide
ugcctgtgucauaagcaaaguug

SEQ ID NO: 2045 - RNA, 23 nt, Artificial Sequence
  Description of Artificial Sequence: Synthetic oligonucleotide
uugccugugucauaagcaaaguu

SEQ ID NO: 2046 - RNA, 23 nt, Artificial Sequence
  Description of Artificial Sequence: Synthetic oligonucleotide
uuugcugauaccugugccugugu

SEQ ID NO: 2047 - DNA, 23 bp, Artificial Sequence
  Description of Artificial Sequence: Synthetic oligonucleotide
  Description of Combined DNA/RNA Molecule: Synthetic oligonucleotide
uaaucatgcugcuguacuuauag

SEQ ID NO: 2048 - DNA, 23 bp, Artificial Sequence
  Description of Artificial Sequence: Synthetic oligonucleotide
  Description of Combined DNA/RNA Molecule: Synthetic oligonucleotide
ucaatcaugcugcuguacuuaua

SEQ ID NO: 2049 - RNA, 23 nt, Artificial Sequence
  Description of Artificial Sequence: Synthetic oligonucleotide
uucaaucaugcugcuguacuuau

SEQ ID NO: 2050 - DNA, 23 bp, Artificial Sequence
  Description of Artificial Sequence: Synthetic oligonucleotide
  Description of Combined DNA/RNA Molecule: Synthetic oligonucleotide
uucaatcaugcugcuguacuuau

SEQ ID NO: 2051 - DNA, 23 bp, Artificial Sequence
  Description of Artificial Sequence: Synthetic oligonucleotide
  Description of Combined DNA/RNA Molecule: Synthetic oligonucleotide
uucaatcaugcugcuguacuuau

SEQ ID NO: 2052 - DNA, 23 bp, Artificial Sequence
  Description of Artificial Sequence: Synthetic oligonucleotide
  Description of Combined DNA/RNA Molecule: Synthetic oligonucleotide
ugucaatcaugcugcuguacuua

SEQ ID NO: 2053 - DNA, 23 bp, Artificial Sequence
  Description of Artificial Sequence: Synthetic oligonucleotide
  Description of Combined DNA/RNA Molecule: Synthetic oligonucleotide
ugucaatcaugcugcuguacuua

SEQ ID NO: 2054 - RNA, 23 nt, Artificial Sequence
  Description of Artificial Sequence: Synthetic oligonucleotide
uagucaaucaugcugcuguacuu

SEQ ID NO: 2055 - RNA, 23 nt, Artificial Sequence
  Description of Artificial Sequence: Synthetic oligonucleotide
uagucaaucaugcugcuguacuu

SEQ ID NO: 2056 - RNA, 23 nt, Artificial Sequence
  Description of Artificial Sequence: Synthetic oligonucleotide
uagucaaucaugcugcuguacuu

SEQ ID NO: 2057 - RNA, 23 nt, Artificial Sequence
  Description of Artificial Sequence: Synthetic oligonucleotide
uagucaaucaugcugcuguacuu

SEQ ID NO: 2058 - RNA, 23 nt, Artificial Sequence
  Description of Artificial Sequence: Synthetic oligonucleotide
uagucaaucaugcugcuguacuu

SEQ ID NO: 2059 - RNA, 23 nt, Artificial Sequence
  Description of Artificial Sequence: Synthetic oligonucleotide
uagucaaucaugcugcuguacuu

SEQ ID NO: 2060 - RNA, 23 nt, Artificial Sequence
  Description of Artificial Sequence: Synthetic oligonucleotide
uagucaaucaugcugcaguacuu

SEQ ID NO: 2061 - RNA, 23 nt, Artificial Sequence
  Description of Artificial Sequence: Synthetic oligonucleotide
uagucaaucaugcugcucuacuu

SEQ ID NO: 2062 - RNA, 23 nt, Artificial Sequence
  Description of Artificial Sequence: Synthetic oligonucleotide
uagucaaucaugcugcugaacuu

SEQ ID NO: 2063 - RNA, 23 nt, Artificial Sequence
  Description of Artificial Sequence: Synthetic oligonucleotide
uagucaaucaugcugcuguacuu

SEQ ID NO: 2064 - DNA, 23 bp, Artificial Sequence
  Description of Artificial Sequence: Synthetic oligonucleotide
  Description of Combined DNA/RNA Molecule: Synthetic oligonucleotide
uuagtcaaucaugcugcuguacu

SEQ ID NO: 2065 - RNA, 21 nt, Artificial Sequence
  Description of Artificial Sequence: Synthetic oligonucleotide
uagucaaucaugcugcugugc

SEQ ID NO: 2066 - RNA, 23 nt, Artificial Sequence
  Description of Artificial Sequence: Synthetic oligonucleotide
uguagucaaucaugcugcuguac

SEQ ID NO: 2067 - DNA, 23 bp, Artificial Sequence
  Description of Artificial Sequence: Synthetic oligonucleotide
  Description of Combined DNA/RNA Molecule: Synthetic oligonucleotide
uguagtcaaucaugcugcuguac

SEQ ID NO: 2068 - DNA, 23 bp, Artificial Sequence
  Description of Artificial Sequence: Synthetic oligonucleotide
  Description of Combined DNA/RNA Molecule: Synthetic oligonucleotide
uguagtcaaucaugcugcuguac

SEQ ID NO: 2069 - DNA, 23 bp, Artificial Sequence
  Description of Artificial Sequence: Synthetic oligonucleotide
  Description of Combined DNA/RNA Molecule: Synthetic oligonucleotide
uuguagtcaaucaugcugcugua

SEQ ID NO: 2070 - DNA, 23 bp, Artificial Sequence
  Description of Artificial Sequence: Synthetic oligonucleotide
  Description of Combined DNA/RNA Molecule: Synthetic oligonucleotide
uuugtagucaaucaugcugcugu

SEQ ID NO: 2071 - RNA, 23 nt, Artificial Sequence
  Description of Artificial Sequence: Synthetic oligonucleotide
uguuguagucaaucaugcugcug

SEQ ID NO: 2072 - DNA, 23 bp, Artificial Sequence
  Description of Artificial Sequence: Synthetic oligonucleotide
  Description of Combined DNA/RNA Molecule: Synthetic oligonucleotide
uggutgtagucaaucaugcugcu

SEQ ID NO: 2073 - DNA, 23 bp, Artificial Sequence
  Description of Artificial Sequence: Synthetic oligonucleotide
  Description of Combined DNA/RNA Molecule: Synthetic oligonucleotide
uggggutguagucaaucaugcug

SEQ ID NO: 2074 - RNA, 23 nt, Artificial Sequence
  Description of Artificial Sequence: Synthetic oligonucleotide
uguugucccaggcaaagagcuuc

SEQ ID NO: 2075 - DNA, 23 bp, Artificial Sequence
  Description of Artificial Sequence: Synthetic oligonucleotide
  Description of Combined DNA/RNA Molecule: Synthetic oligonucleotide
ugutgtcccaggcaaagagcuuc

SEQ ID NO: 2076 - DNA, 23 bp, Artificial Sequence
  Description of Artificial Sequence: Synthetic oligonucleotide
  Description of Combined DNA/RNA Molecule: Synthetic oligonucleotide
uaugtucaaguugucccaggcaa

SEQ ID NO: 2077 - DNA, 23 bp, Artificial Sequence
  Description of Artificial Sequence: Synthetic oligonucleotide
  Description of Combined DNA/RNA Molecule: Synthetic oligonucleotide
uaugutcaaguugucccaggcaa

SEQ ID NO: 2078 - DNA, 23 bp, Artificial Sequence
  Description of Artificial Sequence: Synthetic oligonucleotide
  Description of Combined DNA/RNA Molecule: Synthetic oligonucleotide
uaugutcaaguugucccaggcaa

SEQ ID NO: 2079 - DNA, 23 bp, Artificial Sequence
  Description of Artificial Sequence: Synthetic oligonucleotide
  Description of Combined DNA/RNA Molecule: Synthetic oligonucleotide
uccatgtucaaguugucccaggc

SEQ ID NO: 2080 - RNA, 23 nt, Artificial Sequence
  Description of Artificial Sequence: Synthetic oligonucleotide
uaccauguucaaguugucccagg

SEQ ID NO: 2081 - DNA, 23 bp, Artificial Sequence
  Description of Artificial Sequence: Synthetic oligonucleotide
  Description of Combined DNA/RNA Molecule: Synthetic oligonucleotide
ugaccatguucaaguugucccag

SEQ ID NO: 2082 - DNA, 23 bp, Artificial Sequence
  Description of Artificial Sequence: Synthetic oligonucleotide
  Description of Combined DNA/RNA Molecule: Synthetic oligonucleotide
ugaccatguucaaguugucccag

SEQ ID NO: 2083 - RNA, 23 nt, Artificial Sequence
  Description of Artificial Sequence: Synthetic oligonucleotide
uugaccauguucaaguuguccca

SEQ ID NO: 2084 - RNA, 23 nt, Artificial Sequence
  Description of Artificial Sequence: Synthetic oligonucleotide
ugugaccauguucaaguuguccc

SEQ ID NO: 2085 - RNA, 23 nt, Artificial Sequence
  Description of Artificial Sequence: Synthetic oligonucleotide
ugugaccauguucaaguuguccc

SEQ ID NO: 2086 - RNA, 23 nt, Artificial Sequence
  Description of Artificial Sequence: Synthetic oligonucleotide
uagugaccauguucaaguugucc

SEQ ID NO: 2087 - DNA, 23 bp, Artificial Sequence
  Description of Artificial Sequence: Synthetic oligonucleotide
  Description of Combined DNA/RNA Molecule: Synthetic oligonucleotide
uagtgaccauguucaaguugucc

SEQ ID NO: 2088 - DNA, 23 bp, Artificial Sequence
  Description of Artificial Sequence: Synthetic oligonucleotide
  Description of Combined DNA/RNA Molecule: Synthetic oligonucleotide
uaagtgaccauguucaaguuguc

SEQ ID NO: 2089 - RNA, 23 nt, Artificial Sequence
  Description of Artificial Sequence: Synthetic oligonucleotide
uuaagugaccauguucaaguugu

SEQ ID NO: 2090 - DNA, 23 bp, Artificial Sequence
  Description of Artificial Sequence: Synthetic oligonucleotide
  Description of Combined DNA/RNA Molecule: Synthetic oligonucleotide
uauaagtgaccauguucaaguug

SEQ ID NO: 2091 - RNA, 23 nt, Artificial Sequence
  Description of Artificial Sequence: Synthetic oligonucleotide
ucauaagugaccauguucaaguu

SEQ ID NO: 2092 - RNA, 23 nt, Artificial Sequence
  Description of Artificial Sequence: Synthetic oligonucleotide
ucauaagugaccauguucaaguu

SEQ ID NO: 2093 - DNA, 23 bp, Artificial Sequence
  Description of Artificial Sequence: Synthetic oligonucleotide
  Description of Combined DNA/RNA Molecule: Synthetic oligonucleotide
ucataagugaccauguucaaguu

SEQ ID NO: 2094 - RNA, 23 nt, Artificial Sequence
  Description of Artificial Sequence: Synthetic oligonucleotide
ucauaagugaccauguucaaguu

SEQ ID NO: 2095 - RNA, 23 nt, Artificial Sequence
  Description of Artificial Sequence: Synthetic oligonucleotide
ucauaagugaccauguacaaguu

SEQ ID NO: 2096 - RNA, 23 nt, Artificial Sequence
  Description of Artificial Sequence: Synthetic oligonucleotide
ucauaagugaccauguugaaguu

SEQ ID NO: 2097 - RNA, 23 nt, Artificial Sequence
  Description of Artificial Sequence: Synthetic oligonucleotide
ucauaagugaccauguucuaguu

SEQ ID NO: 2098 - RNA, 23 nt, Artificial Sequence
  Description of Artificial Sequence: Synthetic oligonucleotide
ucauaagugaccauguucaaguu

SEQ ID NO: 2099 - RNA, 23 nt, Artificial Sequence
  Description of Artificial Sequence: Synthetic oligonucleotide
ucauaagugaccauguucaaguu

SEQ ID NO: 2100 - RNA, 23 nt, Artificial Sequence
  Description of Artificial Sequence: Synthetic oligonucleotide
ucauaagugaccauguucaaguu

SEQ ID NO: 2101 - DNA, 23 bp, Artificial Sequence
  Description of Artificial Sequence: Synthetic oligonucleotide
  Description of Combined DNA/RNA Molecule: Synthetic oligonucleotide
uucataagugaccauguucaagu

SEQ ID NO: 2102 - DNA, 23 bp, Artificial Sequence
  Description of Artificial Sequence: Synthetic oligonucleotide
  Description of Combined DNA/RNA Molecule: Synthetic oligonucleotide
uucataagugaccauguucaagu

SEQ ID NO: 2103 - DNA, 23 bp, Artificial Sequence
  Description of Artificial Sequence: Synthetic oligonucleotide
  Description of Combined DNA/RNA Molecule: Synthetic oligonucleotide
utcataagugaccauguucaagu

SEQ ID NO: 2104 - DNA, 23 bp, Artificial Sequence
  Description of Artificial Sequence: Synthetic oligonucleotide
  Description of Combined DNA/RNA Molecule: Synthetic oligonucleotide
utcataagugaccauguucaagu

SEQ ID NO: 2105 - DNA, 23 bp, Artificial Sequence
  Description of Artificial Sequence: Synthetic oligonucleotide
  Description of Combined DNA/RNA Molecule: Synthetic oligonucleotide
uucataagugaccaugaucaagu

SEQ ID NO: 2106 - DNA, 23 bp, Artificial Sequence
  Description of Artificial Sequence: Synthetic oligonucleotide
  Description of Combined DNA/RNA Molecule: Synthetic oligonucleotide
uucataagugaccauguacaagu

SEQ ID NO: 2107 - DNA, 23 bp, Artificial Sequence
  Description of Artificial Sequence: Synthetic oligonucleotide
  Description of Combined DNA/RNA Molecule: Synthetic oligonucleotide
uucataagugaccauguugaagu

SEQ ID NO: 2108 - RNA, 23 nt, Artificial Sequence
  Description of Artificial Sequence: Synthetic oligonucleotide
uucauaagugaccauguucaagu

SEQ ID NO: 2109 - DNA, 23 bp, Artificial Sequence
  Description of Artificial Sequence: Synthetic oligonucleotide
  Description of Combined DNA/RNA Molecule: Synthetic oligonucleotide
utcataagugaccauguucaagu

SEQ ID NO: 2110 - RNA, 21 nt, Artificial Sequence
  Description of Artificial Sequence: Synthetic oligonucleotide
ucauaagugaccauguucagg

SEQ ID NO: 2111 - RNA, 23 nt, Artificial Sequence
  Description of Artificial Sequence: Synthetic oligonucleotide
ugucauaagugaccauguucaag

SEQ ID NO: 2112 - DNA, 21 bp, Artificial Sequence
  Description of Artificial Sequence: Synthetic oligonucleotide
  Description of Combined DNA/RNA Molecule: Synthetic oligonucleotide
uucataagugaccauguucgg

SEQ ID NO: 2113 - DNA, 23 bp, Artificial Sequence
  Description of Artificial Sequence: Synthetic oligonucleotide
  Description of Combined DNA/RNA Molecule: Synthetic oligonucleotide
uugucataagugaccauguucaa

SEQ ID NO: 2114 - DNA, 23 bp, Artificial Sequence
  Description of Artificial Sequence: Synthetic oligonucleotide
  Description of Combined DNA/RNA Molecule: Synthetic oligonucleotide
uaugtcauaagugaccauguuca

SEQ ID NO: 2115 - RNA, 23 nt, Artificial Sequence
  Description of Artificial Sequence: Synthetic oligonucleotide
ugaugucauaagugaccauguuc

SEQ ID NO: 2116 - DNA, 23 bp, Artificial Sequence
  Description of Artificial Sequence: Synthetic oligonucleotide
  Description of Combined DNA/RNA Molecule: Synthetic oligonucleotide
ugatgtcauaagugaccauguuc

SEQ ID NO: 2117 - DNA, 23 bp, Artificial Sequence
  Description of Artificial Sequence: Synthetic oligonucleotide
  Description of Combined DNA/RNA Molecule: Synthetic oligonucleotide
ugaugtcauaagugaccauguuc

SEQ ID NO: 2118 - DNA, 23 bp, Artificial Sequence
  Description of Artificial Sequence: Synthetic oligonucleotide
  Description of Combined DNA/RNA Molecule: Synthetic oligonucleotide
uugatgtcauaagugaccauguu

SEQ ID NO: 2119 - RNA, 23 nt, Artificial Sequence
  Description of Artificial Sequence: Synthetic oligonucleotide
uuugaugucauaagugaccaugu

SEQ ID NO: 2120 - DNA, 23 bp, Artificial Sequence
  Description of Artificial Sequence: Synthetic oligonucleotide
  Description of Combined DNA/RNA Molecule: Synthetic oligonucleotide
ucuugatgucauaagugaccaug

SEQ ID NO: 2121 - DNA, 23 bp, Artificial Sequence
  Description of Artificial Sequence: Synthetic oligonucleotide
  Description of Combined DNA/RNA Molecule: Synthetic oligonucleotide
ugcutgaugucauaagugaccau

SEQ ID NO: 2122 - DNA, 23 bp, Artificial Sequence
  Description of Artificial Sequence: Synthetic oligonucleotide
  Description of Combined DNA/RNA Molecule: Synthetic oligonucleotide
uagctugaugucauaagugacca

SEQ ID NO: 2123 - DNA, 23 bp, Artificial Sequence
  Description of Artificial Sequence: Synthetic oligonucleotide
  Description of Combined DNA/RNA Molecule: Synthetic oligonucleotide
uccctgagcaucuccuucugcca

SEQ ID NO: 2124 - RNA, 23 nt, Artificial Sequence
  Description of Artificial Sequence: Synthetic oligonucleotide
uuggcuggcuggcucucccuuca

SEQ ID NO: 2125 - DNA, 23 bp, Artificial Sequence
  Description of Artificial Sequence: Synthetic oligonucleotide
  Description of Combined DNA/RNA Molecule: Synthetic oligonucleotide
uagatggugaccauguucauccu

SEQ ID NO: 2126 - RNA, 23 nt, Artificial Sequence
  Description of Artificial Sequence: Synthetic oligonucleotide
uauuaaacaucccauaaaugcug

SEQ ID NO: 2127 - RNA, 23 nt, Artificial Sequence
  Description of Artificial Sequence: Synthetic oligonucleotide
uuugaacuaugucauuaaacauc

SEQ ID NO: 2128 - RNA, 23 nt, Artificial Sequence
  Description of Artificial Sequence: Synthetic oligonucleotide
uuugaacuaugucauuaaacauc

SEQ ID NO: 2129 - DNA, 23 bp, Artificial Sequence
  Description of Artificial Sequence: Synthetic oligonucleotide
  Description of Combined DNA/RNA Molecule: Synthetic oligonucleotide
uuugaactaugucauuaaacauc

SEQ ID NO: 2130 - RNA, 23 nt, Artificial Sequence
  Description of Artificial Sequence: Synthetic oligonucleotide
ucuugaacuaugucauuaaacau

SEQ ID NO: 2131 - RNA, 23 nt, Artificial Sequence
  Description of Artificial Sequence: Synthetic oligonucleotide
ucuugaacuaugucauuaaacau

SEQ ID NO: 2132 - DNA, 23 bp, Artificial Sequence
  Description of Artificial Sequence: Synthetic oligonucleotide
  Description of Combined DNA/RNA Molecule: Synthetic oligonucleotide
uacutgaacuaugucauuaaaca

SEQ ID NO: 2133 - DNA, 23 bp, Artificial Sequence
  Description of Artificial Sequence: Synthetic oligonucleotide
  Description of Combined DNA/RNA Molecule: Synthetic oligonucleotide
uaactugaacuaugucauuaaac

SEQ ID NO: 2134 - DNA, 23 bp, Artificial Sequence
  Description of Artificial Sequence: Synthetic oligonucleotide
  Description of Combined DNA/RNA Molecule: Synthetic oligonucleotide
uaaacutgaacuaugucauuaaa

SEQ ID NO: 2135 - DNA, 23 bp, Artificial Sequence
  Description of Artificial Sequence: Synthetic oligonucleotide
  Description of Combined DNA/RNA Molecule: Synthetic oligonucleotide
uaaacutgaactaugucauuaaa

SEQ ID NO: 2136 - DNA, 23 bp, Artificial Sequence
  Description of Artificial Sequence: Synthetic oligonucleotide
  Description of Combined DNA/RNA Molecule: Synthetic oligonucleotide
uaaaactugaacuaugucauuaa

SEQ ID NO: 2137 - DNA, 23 bp, Artificial Sequence
  Description of Artificial Sequence: Synthetic oligonucleotide
  Description of Combined DNA/RNA Molecule: Synthetic oligonucleotide
uaaaactugaacuaugucauuaa

SEQ ID NO: 2138 - RNA, 23 nt, Artificial Sequence
  Description of Artificial Sequence: Synthetic oligonucleotide
ugaaaacuugaacuaugucauua

SEQ ID NO: 2139 - RNA, 23 nt, Artificial Sequence
  Description of Artificial Sequence: Synthetic oligonucleotide
uagaaaacuugaacuaugucauu

SEQ ID NO: 2140 - RNA, 23 nt, Artificial Sequence
  Description of Artificial Sequence: Synthetic oligonucleotide
uaagaaaacuugaacuaugucau

SEQ ID NO: 2141 - RNA, 23 nt, Artificial Sequence
  Description of Artificial Sequence: Synthetic oligonucleotide
ucaagaaaacuugaacuauguca

SEQ ID NO: 2142 - DNA, 23 bp, Artificial Sequence
  Description of Artificial Sequence: Synthetic oligonucleotide
  Description of Combined DNA/RNA Molecule: Synthetic oligonucleotide
ucaagaaaacutgaacuaugucg

SEQ ID NO: 2143 - RNA, 23 nt, Artificial Sequence
  Description of Artificial Sequence: Synthetic oligonucleotide
ucaagaaaacuugaacuaugucg

SEQ ID NO: 2144 - DNA, 23 bp, Artificial Sequence
  Description of Artificial Sequence: Synthetic oligonucleotide
  Description of Combined DNA/RNA Molecule: Synthetic oligonucleotide
ucaagaaaacutgaacuaugucg

SEQ ID NO: 2145 - RNA, 23 nt, Artificial Sequence
  Description of Artificial Sequence: Synthetic oligonucleotide
ucaagaaaacuugaacaaugucg

SEQ ID NO: 2146 - RNA, 23 nt, Artificial Sequence
  Description of Artificial Sequence: Synthetic oligonucleotide
ucaagaaaacuugaacuuugucg

SEQ ID NO: 2147 - RNA, 23 nt, Artificial Sequence
  Description of Artificial Sequence: Synthetic oligonucleotide
ucaagaaaacuugaacuaagucg

SEQ ID NO: 2148 - DNA, 23 bp, Artificial Sequence
  Description of Artificial Sequence: Synthetic oligonucleotide
  Description of Combined DNA/RNA Molecule: Synthetic oligonucleotide
ucaagaaaacutgaacuauguca

SEQ ID NO: 2149 - DNA, 23 bp, Artificial Sequence
  Description of Artificial Sequence: Synthetic oligonucleotide
  Description of Combined DNA/RNA Molecule: Synthetic oligonucleotide
uacaagaaaactugaacuauguc

SEQ ID NO: 2150 - RNA, 21 nt, Artificial Sequence
  Description of Artificial Sequence: Synthetic oligonucleotide
ucaagaaaacuugaacuaugu

SEQ ID NO: 2151 - DNA, 21 bp, Artificial Sequence
  Description of Artificial Sequence: Synthetic oligonucleotide
  Description of Combined DNA/RNA Molecule: Synthetic oligonucleotide
ucaagaaaacutgaacuaugu

SEQ ID NO: 2152 - RNA, 23 nt, Artificial Sequence
  Description of Artificial Sequence: Synthetic oligonucleotide
ucacaagaaaacuugaacuaugu

SEQ ID NO: 2153 - RNA, 23 nt, Artificial Sequence
  Description of Artificial Sequence: Synthetic oligonucleotide
uucacaagaaaacuugaacuaug

SEQ ID NO: 2154 - DNA, 23 bp, Artificial Sequence
  Description of Artificial Sequence: Synthetic oligonucleotide
  Description of Combined DNA/RNA Molecule: Synthetic oligonucleotide
utcacaagaaaacuugaacuaug

SEQ ID NO: 2155 - RNA, 23 nt, Artificial Sequence
  Description of Artificial Sequence: Synthetic oligonucleotide
uaucacaagaaaacuugaacuau

SEQ ID NO: 2156 - RNA, 23 nt, Artificial Sequence
  Description of Artificial Sequence: Synthetic oligonucleotide
uaucacaagaaaacuugaacuau

SEQ ID NO: 2157 - RNA, 23 nt, Artificial Sequence
  Description of Artificial Sequence: Synthetic oligonucleotide
uaaucacaagaaaacuugaacua

SEQ ID NO: 2158 - DNA, 23 bp, Artificial Sequence
  Description of Artificial Sequence: Synthetic oligonucleotide
  Description of Combined DNA/RNA Molecule: Synthetic oligonucleotide
uaatcacaagaaaacuugaacua

SEQ ID NO: 2159 - DNA, 23 bp, Artificial Sequence
  Description of Artificial Sequence: Synthetic oligonucleotide
  Description of Combined DNA/RNA Molecule: Synthetic oligonucleotide
uaaatcacaagaaaacuugaacu

SEQ ID NO: 2160 - RNA, 23 nt, Artificial Sequence
  Description of Artificial Sequence: Synthetic oligonucleotide
ucaaaucacaagaaaacuugaac

SEQ ID NO: 2161 - DNA, 23 bp, Artificial Sequence
  Description of Artificial Sequence: Synthetic oligonucleotide
  Description of Combined DNA/RNA Molecule: Synthetic oligonucleotide
ucaaatcacaagaaaacuugaac

SEQ ID NO: 2162 - DNA, 23 bp, Artificial Sequence
  Description of Artificial Sequence: Synthetic oligonucleotide
  Description of Combined DNA/RNA Molecule: Synthetic oligonucleotide
ucaaatcacaagaaaacuugaac

SEQ ID NO: 2163 - RNA, 23 nt, Artificial Sequence
  Description of Artificial Sequence: Synthetic oligonucleotide
ucaaaucacaagaaaacuugaac

SEQ ID NO: 2164 - DNA, 23 bp, Artificial Sequence
  Description of Artificial Sequence: Synthetic oligonucleotide
  Description of Combined DNA/RNA Molecule: Synthetic oligonucleotide
uccaaatcacaagaaaacuugaa

SEQ ID NO: 2165 - RNA, 23 nt, Artificial Sequence
  Description of Artificial Sequence: Synthetic oligonucleotide
ucccaaaucacaagaaaacuuga

SEQ ID NO: 2166 - RNA, 23 nt, Artificial Sequence
  Description of Artificial Sequence: Synthetic oligonucleotide
uugcaagagcaaugguuuucagg

SEQ ID NO: 2167 - RNA, 23 nt, Artificial Sequence
  Description of Artificial Sequence: Synthetic oligonucleotide
uaugcaagagcaaugguuuucag

SEQ ID NO: 2168 - RNA, 23 nt, Artificial Sequence
  Description of Artificial Sequence: Synthetic oligonucleotide
uaugcaagagcaaugguuuucag

SEQ ID NO: 2169 - RNA, 23 nt, Artificial Sequence
  Description of Artificial Sequence: Synthetic oligonucleotide
ucaugcaagagcaaugguuuuca

SEQ ID NO: 2170 - RNA, 23 nt, Artificial Sequence
  Description of Artificial Sequence: Synthetic oligonucleotide
ucaugcaagagcaaugguuuuca

SEQ ID NO: 2171 - DNA, 23 bp, Artificial Sequence
  Description of Artificial Sequence: Synthetic oligonucleotide
  Description of Combined DNA/RNA Molecule: Synthetic oligonucleotide
uacatgcaagagcaaugguuuuc

SEQ ID NO: 2172 - RNA, 23 nt, Artificial Sequence
  Description of Artificial Sequence: Synthetic oligonucleotide
uacaugcaagagcaaugguuuuc

SEQ ID NO: 2173 - RNA, 23 nt, Artificial Sequence
  Description of Artificial Sequence: Synthetic oligonucleotide
uaacaugcaagagcaaugguuuu

SEQ ID NO: 2174 - DNA, 23 bp, Artificial Sequence
  Description of Artificial Sequence: Synthetic oligonucleotide
  Description of Combined DNA/RNA Molecule: Synthetic oligonucleotide
uuaacatgcaagagcaaugguuu

SEQ ID NO: 2175 - RNA, 23 nt, Artificial Sequence
  Description of Artificial Sequence: Synthetic oligonucleotide
uguaacaugcaagagcaaugguu

SEQ ID NO: 2176 - RNA, 23 nt, Artificial Sequence
  Description of Artificial Sequence: Synthetic oligonucleotide
uuguaacaugcaagagcaauggu

SEQ ID NO: 2177 - DNA, 23 bp, Artificial Sequence
  Description of Artificial Sequence: Synthetic oligonucleotide
  Description of Combined DNA/RNA Molecule: Synthetic oligonucleotide
uugtaacaugcaagagcaauggu

SEQ ID NO: 2178 - DNA, 23 bp, Artificial Sequence
  Description of Artificial Sequence: Synthetic oligonucleotide
  Description of Combined DNA/RNA Molecule: Synthetic oligonucleotide
uaugtaacaugcaagagcaaugg

SEQ ID NO: 2179 - RNA, 23 nt, Artificial Sequence
  Description of Artificial Sequence: Synthetic oligonucleotide
ucauguaacaugcaagagcaaug

SEQ ID NO: 2180 - RNA, 23 nt, Artificial Sequence
  Description of Artificial Sequence: Synthetic oligonucleotide
ucauguaacaugcaagagcaaug

SEQ ID NO: 2181 - RNA, 23 nt, Artificial Sequence
  Description of Artificial Sequence: Synthetic oligonucleotide
ucauguaacaugcaagugcaaug

SEQ ID NO: 2182 - RNA, 23 nt, Artificial Sequence
  Description of Artificial Sequence: Synthetic oligonucleotide
ucauguaacaugcaagaccaaug

SEQ ID NO: 2183 - RNA, 23 nt, Artificial Sequence
  Description of Artificial Sequence: Synthetic oligonucleotide
ucauguaacaugcaagaggaaug

SEQ ID NO: 2184 - RNA, 23 nt, Artificial Sequence
  Description of Artificial Sequence: Synthetic oligonucleotide
ucauguaacaugcaagagcaaug

SEQ ID NO: 2185 - RNA, 23 nt, Artificial Sequence
  Description of Artificial Sequence: Synthetic oligonucleotide
ucauguaacaugcaagagcaaug

SEQ ID NO: 2186 - RNA, 23 nt, Artificial Sequence
  Description of Artificial Sequence: Synthetic oligonucleotide
ucauguaacaugcaagagcaaug

SEQ ID NO: 2187 - DNA, 23 bp, Artificial Sequence
  Description of Artificial Sequence: Synthetic oligonucleotide
  Description of Combined DNA/RNA Molecule: Synthetic oligonucleotide
uccatgtaacaugcaagagcaau

SEQ ID NO: 2188 - RNA, 21 nt, Artificial Sequence
  Description of Artificial Sequence: Synthetic oligonucleotide
ucauguaacaugcaagagcgg

SEQ ID NO: 2189 - RNA, 23 nt, Artificial Sequence
  Description of Artificial Sequence: Synthetic oligonucleotide
uaccauguaacaugcaagagcaa

SEQ ID NO: 2190 - DNA, 23 bp, Artificial Sequence
  Description of Artificial Sequence: Synthetic oligonucleotide
  Description of Combined DNA/RNA Molecule: Synthetic oligonucleotide
uaaccatguaacaugcaagagca

SEQ ID NO: 2191 - DNA, 23 bp, Artificial Sequence
  Description of Artificial Sequence: Synthetic oligonucleotide
  Description of Combined DNA/RNA Molecule: Synthetic oligonucleotide
uaaccatguaacaugcaagagca

SEQ ID NO: 2192 - RNA, 23 nt, Artificial Sequence
  Description of Artificial Sequence: Synthetic oligonucleotide
uuaaccauguaacaugcaagagc

SEQ ID NO: 2193 - RNA, 23 nt, Artificial Sequence
  Description of Artificial Sequence: Synthetic oligonucleotide
uguaaccauguaacaugcaagag

SEQ ID NO: 2194 - RNA, 23 nt, Artificial Sequence
  Description of Artificial Sequence: Synthetic oligonucleotide
uguaaccauguaacaugcaagag

SEQ ID NO: 2195 - RNA, 23 nt, Artificial Sequence
  Description of Artificial Sequence: Synthetic oligonucleotide
ugguaaccauguaacaugcaaga

SEQ ID NO: 2196 - DNA, 23 bp, Artificial Sequence
  Description of Artificial Sequence: Synthetic oligonucleotide
  Description of Combined DNA/RNA Molecule: Synthetic oligonucleotide
uggtaaccauguaacaugcaaga

SEQ ID NO: 2197 - DNA, 23 bp, Artificial Sequence
  Description of Artificial Sequence: Synthetic oligonucleotide
  Description of Combined DNA/RNA Molecule: Synthetic oligonucleotide
ugguaaccaugtaacaugcaaga

SEQ ID NO: 2198 - DNA, 23 bp, Artificial Sequence
  Description of Artificial Sequence: Synthetic oligonucleotide
  Description of Combined DNA/RNA Molecule: Synthetic oligonucleotide
uuggtaaccauguaacaugcaag

SEQ ID NO: 2199 - RNA, 23 nt, Artificial Sequence
  Description of Artificial Sequence: Synthetic oligonucleotide
ugugguaaccauguaacaugcaa

SEQ ID NO: 2200 - DNA, 23 bp, Artificial Sequence
  Description of Artificial Sequence: Synthetic oligonucleotide
  Description of Combined DNA/RNA Molecule: Synthetic oligonucleotide
ugugguaaccatguaacaugcaa

SEQ ID NO: 2201 - DNA, 23 bp, Artificial Sequence
  Description of Artificial Sequence: Synthetic oligonucleotide
  Description of Combined DNA/RNA Molecule: Synthetic oligonucleotide
uuguggtaaccauguaacaugca

SEQ ID NO: 2202 - DNA, 23 bp, Artificial Sequence
  Description of Artificial Sequence: Synthetic oligonucleotide
  Description of Combined DNA/RNA Molecule: Synthetic oligonucleotide
uuugtgguaaccauguaacaugc

SEQ ID NO: 2203 - RNA, 23 nt, Artificial Sequence
  Description of Artificial Sequence: Synthetic oligonucleotide
ucuugugguaaccauguaacaug

SEQ ID NO: 2204 - DNA, 23 bp, Artificial Sequence
  Description of Artificial Sequence: Synthetic oligonucleotide
  Description of Combined DNA/RNA Molecule: Synthetic oligonucleotide
utucgatgcuggccagaggagcu

SEQ ID NO: 2205 - RNA, 23 nt, Artificial Sequence
  Description of Artificial Sequence: Synthetic oligonucleotide
uuaaaugcaucuuacuuauauuc

SEQ ID NO: 2206 - DNA, 23 bp, Artificial Sequence
  Description of Artificial Sequence: Synthetic oligonucleotide
  Description of Combined DNA/RNA Molecule: Synthetic oligonucleotide
uguaaatgcaucuuacuuauauu

SEQ ID NO: 2207 - DNA, 23 bp, Artificial Sequence
  Description of Artificial Sequence: Synthetic oligonucleotide
  Description of Combined DNA/RNA Molecule: Synthetic oligonucleotide
uaguaaaugcatcuuacuuauau

SEQ ID NO: 2208 - DNA, 23 bp, Artificial Sequence
  Description of Artificial Sequence: Synthetic oligonucleotide
  Description of Combined DNA/RNA Molecule: Synthetic oligonucleotide
utagtaaaugcaucuuacuuaua

SEQ ID NO: 2209 - RNA, 23 nt, Artificial Sequence
  Description of Artificial Sequence: Synthetic oligonucleotide
uguaguaaaugcaucuuacuuau

SEQ ID NO: 2210 - RNA, 23 nt, Artificial Sequence
  Description of Artificial Sequence: Synthetic oligonucleotide
uguaguaaaugcaucuuacuugu

SEQ ID NO: 2211 - RNA, 23 nt, Artificial Sequence
  Description of Artificial Sequence: Synthetic oligonucleotide
uguaguaaaugcaucuuacuugu

SEQ ID NO: 2212 - RNA, 23 nt, Artificial Sequence
  Description of Artificial Sequence: Synthetic oligonucleotide
uguaguaaaugcaucuuacuugu

SEQ ID NO: 2213 - RNA, 23 nt, Artificial Sequence
  Description of Artificial Sequence: Synthetic oligonucleotide
uguaguaaaugcaucuuacuugu

SEQ ID NO: 2214 - RNA, 23 nt, Artificial Sequence
  Description of Artificial Sequence: Synthetic oligonucleotide
uguaguaaaugcaucuuacuugu

SEQ ID NO: 2215 - RNA, 23 nt, Artificial Sequence
  Description of Artificial Sequence: Synthetic oligonucleotide
uguaguaaaugcaucuuacuugu

SEQ ID NO: 2216 - RNA, 23 nt, Artificial Sequence
  Description of Artificial Sequence: Synthetic oligonucleotide
uguaguaaaugcaucuaacuugu

SEQ ID NO: 2217 - RNA, 23 nt, Artificial Sequence
  Description of Artificial Sequence: Synthetic oligonucleotide
uguaguaaaugcaucuuucuugu

SEQ ID NO: 2218 - RNA, 23 nt, Artificial Sequence
  Description of Artificial Sequence: Synthetic oligonucleotide
uguaguaaaugcaucuuaguugu

SEQ ID NO: 2219 - RNA, 23 nt, Artificial Sequence
  Description of Artificial Sequence: Synthetic oligonucleotide
uguaguaaaugcaucuuacuuau

SEQ ID NO: 2220 - RNA, 23 nt, Artificial Sequence
  Description of Artificial Sequence: Synthetic oligonucleotide
uguaguaaaugcaucuuacuuau

SEQ ID NO: 2221 - DNA, 23 bp, Artificial Sequence
  Description of Artificial Sequence: Synthetic oligonucleotide
  Description of Combined DNA/RNA Molecule: Synthetic oligonucleotide
uuguagtaaaugcaucuuacuua

SEQ ID NO: 2222 - RNA, 21 nt, Artificial Sequence
  Description of Artificial Sequence: Synthetic oligonucleotide
uguaguaaaugcaucuuacuu

SEQ ID NO: 2223 - RNA, 23 nt, Artificial Sequence
  Description of Artificial Sequence: Synthetic oligonucleotide
uucugaagcauuagaagccaacu

SEQ ID NO: 2224 - RNA, 23 nt, Artificial Sequence
  Description of Artificial Sequence: Synthetic oligonucleotide
uucuaucugaagcauuagaagcc

SEQ ID NO: 2225 - DNA, 23 bp, Artificial Sequence
  Description of Artificial Sequence: Synthetic oligonucleotide
  Description of Combined DNA/RNA Molecule: Synthetic oligonucleotide
uuctatcugaagcauuagaagcc

SEQ ID NO: 2226 - DNA, 23 bp, Artificial Sequence
  Description of Artificial Sequence: Synthetic oligonucleotide
  Description of Combined DNA/RNA Molecule: Synthetic oligonucleotide
uucuatctgaagcauuagaagcc

We claim:

1. A double stranded ribonucleic acid (dsRNA) agent for inhibiting expression of myocilin (MYOC), wherein the dsRNA agent comprises a sense strand and an antisense strand forming a double stranded region, wherein the antisense strand comprises a nucleotide sequence comprising at least 15 contiguous nucleotides, with 0, 1, 2, or 3 mismatches, from one of the antisense sequences listed in any one of Tables 2A and 2B, and wherein the sense strand comprises a nucleotide sequence comprising at least 15 contiguous nucleotides, with 0, 1, 2, or 3 mismatches, from a sense sequence listed in any one of Tables 2A and 2B that corresponds to the antisense sequence.

2. The dsRNA agent of claim 1, wherein the antisense strand comprises a nucleotide sequence comprising at least 15 contiguous nucleotides, with 0, 1, 2, or 3 mismatches, from the antisense strand nucleotide sequence of duplex AD-1565804 and the sense strand comprises a nucleotide sequence comprising at least 15 contiguous nucleotides, with 0, 1, 2, or 3 mismatches, from the sense strand nucleotide sequence of duplex AD-1565804.

3. The dsRNA agent of claim 1, wherein the antisense strand comprises a nucleotide sequence comprising at least 15 contiguous nucleotides, with 0, 1, 2, or 3 mismatches, from the antisense strand nucleotide sequence of duplex AD-1565837 and the sense strand comprises a nucleotide sequence comprising at least 15 contiguous nucleotides, with 0, 1, 2, or 3 mismatches, from the sense strand nucleotide sequence of duplex AD-1565837.

4. The dsRNA agent of any one of claims 1-3, wherein at least one of the sense strand and the antisense strand is conjugated to one or more lipophilic moieties.

5. The dsRNA agent of claim 4, wherein the lipophilic moiety is conjugated via a linker or carrier.

6. The dsRNA agent of claim 4 or 5, wherein one or more lipophilic moieties are conjugated to one or more internal positions on at least one strand.

7. The dsRNA agent of any one of claims 1-3, wherein at least one of the sense strand and the antisense strand is conjugated to one or more of an arginine-glycine-aspartic acid (RGD)-peptide or RGD peptide mimetic.

8. The dsRNA agent of any one of claims 4-6, wherein the lipophilic moiety is an aliphatic, alicyclic, or polyalicyclic compound.

9. The dsRNA agent of claim 8, wherein the lipophilic moiety contains a saturated or unsaturated C16 hydrocarbon chain.

10. The dsRNA agent of any one of claims 4-6, wherein the lipophilic moiety is conjugated via a carrier that replaces one or more nucleotide(s) in the internal position(s) or the double stranded region.

11. The dsRNA agent of any one of claims 4-6, wherein the lipophilic moiety is conjugated to the double-stranded iRNA agent via a linker containing an ether, thioether, urea, carbonate, amine, amide, maleimide-thioether, disulfide, phosphodiester, sulfonamide linkage, a product of a click reaction, or carbamate.

12. The double-stranded iRNA agent of any one of claims 4-6, wherein the lipophilic moiety is conjugated to a nucleobase, sugar moiety, or internucleosidic linkage.

13. The dsRNA agent of any one of claims 1-12, wherein the dsRNA agent comprises at least one modified nucleotide.

14. The dsRNA agent of claim 13, wherein no more than five of the sense strand nucleotides and not more than five of the nucleotides of the antisense strand are unmodified nucleotides.

15. The dsRNA agent of claim 13, wherein all of the nucleotides of the sense strand and all of the nucleotides of the antisense strand comprise a modification.

16. The dsRNA agent of any one of claims 13-15, wherein at least one of the modified nucleotides is selected from the group consisting of a deoxy-nucleotide, a 3′-terminal deoxy-thymine (dT) nucleotide, a 2′-O-methyl modified nucleotide, a 2′-fluoro modified nucleotide, a 2′-deoxy-modified nucleotide, a locked nucleotide, an unlocked nucleotide, a conformationally restricted nucleotide, a constrained ethyl nucleotide, an abasic nucleotide, a 2′-amino-modified nucleotide, a 2′-O-allyl-modified nucleotide, 2′-C-alkyl-modified nucleotide, a 2′-methoxyethyl modified nucleotide, a 2′-O-alkyl-modified nucleotide, a morpholino nucleotide, a phosphoramidate, a non-natural base comprising nucleotide, a tetrahydropyran modified nucleotide, a 1,5-anhydrohexitol modified nucleotide, a cyclohexenyl modified nucleotide, a nucleotide comprising a phosphorothioate group, a nucleotide comprising a methylphosphonate group, a nucleotide comprising a 5′-phosphate, a nucleotide comprising a 5′-phosphate mimic, a glycol modified nucleotide, and a 2-O—(N-methylacetamide) modified nucleotide; and combinations thereof.

17. The dsRNA agent of any of any one of claims 1-16, wherein at least one strand comprises a 3′ overhang of at least 2 nucleotides.

18. The dsRNA agent of any one of claims 1-17, wherein the double stranded region is 15-30 nucleotide pairs in length.

19. The dsRNA agent of claim 18, wherein the double stranded region is 17-23 nucleotide pairs in length.

20. The dsRNA agent of any one of claims 1-19, wherein each strand has 19-30 nucleotides.

21. The dsRNA agent of any one of claims 1-20, wherein the agent comprises at least one phosphorothioate or methylphosphonate internucleotide linkage.

22. The dsRNA agent of any one of claims 4-21, further comprising a targeting ligand, e.g., a ligand that targets an ocular tissue.

23. The dsRNA agent of claim 22, wherein the ocular tissue is a trabecular meshwork tissue, a ciliary body, a retinal tissue, a retinal pigment epithelium (RPE) or choroid tissue, e.g., a choroid vessel.

24. The dsRNA agent of any one of claims 1-23, further comprising a phosphate or phosphate mimic at the 5′-end of the antisense strand.

25. The dsRNA agent of claim 24, wherein the phosphate mimic is a 5′-vinyl phosphonate (VP).

26. The dsRNA of any one of claims 1-25, wherein the dsRNA agent targets a hotspot region of an mRNA encoding MYOC.

27. A dsRNA agent that targets a hotspot region of a myocilin (MYOC) mRNA.

28. A cell containing the dsRNA agent of any one of claims 1-27.

29. A pharmaceutical composition for inhibiting expression of a MYOC, comprising the dsRNA agent of any one of claims 1-27.

30. A method of inhibiting expression of MYOC in a cell, the method comprising:
(a) contacting the cell with the dsRNA agent of any one of claims 1-27, or a pharmaceutical composition of claim 29; and
(b) maintaining the cell produced in step (a) for a time sufficient to reduce levels of MYOC mRNA, MYOC protein, or both of MYOC mRNA and protein, thereby inhibiting expression of MYOC in the cell.

31. The method of claim 30, wherein the cell is within a subject.

32. The method of claim 31, wherein the subject is a human.

33. The method of claim 32, wherein the subject has been diagnosed with a MYOC-associated disorder, e.g., glaucoma (e.g., primary open angle glaucoma (POAG), angle closure glaucoma, congenital glaucoma, and secondary glaucoma).

34. A method of treating a subject diagnosed with a MYOC-associated disorder comprising administering to the subject a therapeutically effective amount of the dsRNA agent of any one of claims 1-27 or a pharmaceutical composition of claim 29, thereby treating the disorder.

35. The method of claim 34, wherein the MYOC-associated disorder is glaucoma.

36. The method of claim 35, wherein glaucoma is primary open angle glaucoma (POAG).

37. The method of any one of claims 34-36, wherein treating comprises amelioration of at least one sign or symptom of the disorder.

38. The method of any one of claims 34-37, wherein the treating comprises (a) inhibiting or reducing the expression or activity of MYOC; (b) reducing the level of misfolded MYOC protein; (c) reducing trabecular meshwork cell death; (d) decreasing intraocular pressure; or (e) increasing visual acuity.

39. The method of any one of claims 31-38, wherein the dsRNA agent is administered to the subject intraocularly, intravenously, or topically.

40. The method of claim 39, wherein the intraocular administration comprises intravitreal administration (e.g., intravitreal injection), transscleral administration (e.g., transscleral injection), subconjunctival administration (e.g., subconjunctival injection), retrobulbar administration (e.g., retrobulbar injection), intracameral administration (e.g., intracameral injection), or subretinal administration (e.g., subretinal injection).

41. The method of any one of claims 31-40, further comprising administering to the subject an additional agent or therapy suitable for treatment or prevention of an MYOC-associated disorder (e.g., laser trabeculoplasty surgery, trabeculectomy surgery, a minimally invasive glaucoma surgery, placement of a drainage tube in the eye, oral medication, or eye drops).
